United States Patent Application Publication US 2022/0211063 A1 - sequence listing, part 37

SEQ ID NO: 104 - DNA, 7752769 bp, Penicillium roqueforti (residues 5,814,580-7,752,769 of 7,752,769)
  misc_feature (471)..(2988): n is a, c, g, or t
  misc_feature (125072)..(125245): n is a, c, g, or t
  misc_feature (177032)..(177807): n is a, c, g, or t
  misc_feature (384131)..(384321): n is a, c, g, or t
  misc_feature (555855)..(555880): n is a, c, g, or t
  misc_feature (601269)..(601369): n is a, c, g, or t
  misc_feature (676760)..(677104): n is a, c, g, or t
  misc_feature (719500)..(719699): n is a, c, g, or t
  misc_feature (1142715)..(1142932): n is a, c, g, or t
  misc_feature (1186263)..(1186885): n is a, c, g, or t
  misc_feature (1335746)..(1335917): n is a, c, g, or t
  misc_feature (1623895)..(1624083): n is a, c, g, or t
  misc_feature (1638049)..(1638216): n is a, c, g, or t
  misc_feature (1653229)..(1653350): n is a, c, g, or t
  misc_feature (1825533)..(1825713): n is a, c, g, or t
  misc_feature (2226341)..(2226489): n is a, c, g, or t
  misc_feature (2393331)..(2393497): n is a, c, g, or t
  misc_feature (2448034)..(2448172): n is a, c, g, or t
  misc_feature (2535309)..(2535422): n is a, c, g, or t
  misc_feature (2536982)..(2537204): n is a, c, g, or t
  misc_feature (2854127)..(2854165): n is a, c, g, or t
  misc_feature (2984530)..(2984779): n is a, c, g, or t
  misc_feature (3020832)..(3020991): n is a, c, g, or t
  misc_feature (3033668)..(3034045): n is a, c, g, or t
  misc_feature (3159261)..(3159382): n is a, c, g, or t
  misc_feature (3215495)..(3215760): n is a, c, g, or t
  misc_feature (3224555)..(3224857): n is a, c, g, or t
  misc_feature (3317439)..(3317719): n is a, c, g, or t
  misc_feature (3542087)..(3542262): n is a, c, g, or t
  misc_feature (3623094)..(3671593): n is a, c, g, or t
  misc_feature (3674133)..(3676169): n is a, c, g, or t
  misc_feature (3690943)..(3691177): n is a, c, g, or t
  misc_feature (3731688)..(3731946): n is a, c, g, or t
  misc_feature (3989072)..(3989247): n is a, c, g, or t
  misc_feature (3992031)..(3992142): n is a, c, g, or t
  misc_feature (4101392)..(4101829): n is a, c, g, or t
  misc_feature (4338949)..(4339078): n is a, c, g, or t
  misc_feature (4339456)..(4339760): n is a, c, g, or t
  misc_feature (4384123)..(4384285): n is a, c, g, or t
  misc_feature (4533763)..(4533989): n is a, c, g, or t
  misc_feature (4697083)..(4697253): n is a, c, g, or t
  misc_feature (4793877)..(4796592): n is a, c, g, or t
  misc_feature (4802191)..(4802563): n is a, c, g, or t
  misc_feature (5082556)..(5082699): n is a, c, g, or t
  misc_feature (5096738)..(5096894): n is a, c, g, or t
  misc_feature (5239486)..(5239624): n is a, c, g, or t
  misc_feature (5277839)..(5278023): n is a, c, g, or t
  misc_feature (5381237)..(5381436): n is a, c, g, or t
  misc_feature (5479330)..(5479761): n is a, c, g, or t
  misc_feature (5512321)..(5512517): n is a, c, g, or t
  misc_feature (5631252)..(5631339): n is a, c, g, or t
  misc_feature (5721734)..(5721958): n is a, c, g, or t
  misc_feature (5728851)..(5728996): n is a, c, g, or t
  misc_feature (5774044)..(5774133): n is a, c, g, or t
  misc_feature (5808510)..(5808554): n is a, c, g, or t
  misc_feature (5832986)..(5833103): n is a, c, g, or t
  misc_feature (5846543)..(5846734): n is a, c, g, or t
  misc_feature (5859671)..(5864392): n is a, c, g, or t
  misc_feature (5865373)..(5948372): n is a, c, g, or t
  misc_feature (5948953)..(5949387): n is a, c, g, or t
  misc_feature (6008441)..(6008529): n is a, c, g, or t
  misc_feature (6324411)..(6325132): n is a, c, g, or t
  misc_feature (6373261)..(6373621): n is a, c, g, or t
  misc_feature (6805627)..(6805629): n is a, c, g, or t
  misc_feature (6847060)..(6848075): n is a, c, g, or t
  misc_feature (6999759)..(6999891): n is a, c, g, or t
  misc_feature (7043521)..(7047328): n is a, c, g, or t
  misc_feature (7057075)..(7057580): n is a, c, g, or t
  misc_feature (7108482)..(7109253): n is a, c, g, or t
  misc_feature (7114390)..(7115078): n is a, c, g, or t
  misc_feature (7152168)..(7152363): n is a, c, g, or t
  misc_feature (7347495)..(7347601): n is a, c, g, or t
  misc_feature (7355758)..(7355762): n is a, c, g, or t
  misc_feature (7379240)..(7379514): n is a, c, g, or t
  misc_feature (7441661)..(7441886): n is a, c, g, or t
  misc_feature (7525010)..(7525129): n is a, c, g, or t
  misc_feature (7750626)..(7752539): n is a, c, g, or t
cggctggagcccatcgccgaaggaggatagagcctcccagcccgagagcggggtttggatgaccatcgtgcagctccatggcttgaattggcggaacgaccacgaggaaagatatcagaaccactcttgctaattgtgctagggctcctgcgaagagtgttgctagaggggcccaaaaagttgttggaagacatgcgagatacttcacgttctggttgggcaccgaacaaaggcagtttttgcttttggatcgatgtgtagaattccttgagtactgcttcaacctgttgctcccaggctctcactgttccggtgaatggcgtattaaccaaaggcccaacatcatttgcaccgccgtctctgtcaaacaagccgtgggtgacctctgaagggaaagttgcagagcgtgccgacgtaggggcagagtgcgcttcatgggattgagccttggaccggttgactggacgcaacgtctcaaatccctccggtgcggcatccattgcgactcggtgtatagtgggcatggtatttcgaacgaattgagatttggtcatttttgaatcgatgtcagccatatgcagatcagtgtttagtagcaaaatagaatagcaaatggtatggacaacgtcagtagctttgaagccatgactcgggttgcaatcacaccatctggtggaaaaggcatccagcactcgatccacttgttgagtttctcccttgagcaccaaacggtcgcaaagagcccgaagagaggccacaatgttgagattagaccaattgtacagtcgcatgtatgcttcacggaccattgcccgatcagggtcacccagccaagcggcagcagactcgttgcctaccatctggtcctggctgtcgaagagcctctgtgcttgttctcgatctgtagctgtgggtccatcttcaatagcttcgccaggtccatctgcctgatcttcggtgtcatcagactgagagtcttcctgttcaatgagtggggtgttcgcagcggtctgataattcgatgctgttgatatagaatcaacaggagattcgcaaaccctgtcctcggacggaagcgccaatctagcgacattgatttgaggaattgcgacctgtgatttgatgctgcgcgagaaattttccacaacgggggacagggtactagaggcagtaacactctgagacttttcctgcaaagccaagtctgtgaagacttcgccagttgaagatcgatccttctctgtaagaggcgagatgtcctgaccacgagaggcagttgagggctgcagagaagtcttcggtttgggagctccaggagctgaaacactttctcttttcttctgcgcctgcaaaaatgccggttgtcgaattttagcctcccagtccgcattttctttccggtctgattcctcgtcgagataaggattcatgatctgccgcaggctactcacagggcttggagccgccatattatccatagtctgtggtgcaagatgttgaggaataacaattgggggaggagcatggtcaggtaccgacctctttcttctacggaagaacgaagatttcttgttcacgacctgatggggtcctgtgcgagttgaggacggagaagcacctgcagggctcttaactgcttgctgaggtcgtagctttgggctggcagtcatcccattggtttctctactctcattttcttgtaaatgtgacagatcgttggcgtttatacttgctgcatctgccggtccagggactgaattcttagatccaaatacacgccggaagaaacctgggcgttcttttgtgattggagcagtatagttggtggagatgttggccgaaattgtggtggttgccgttgagtctgggggaggaaaagccggcttgttataggagatggtcggactgggggcaggcgagtccaacgaagccgcaatggtcggagggaggccaaaatccgtatcatccatattctggaagtcgttatcccgagctctgagagttcccgtggcgagattttcaggccgaacctttcgaacctggggggcataagcagttttcaaactgttccgtcgcggtactaccggtgtccgcgcggcagcagttgctggcgtcctgccataatcgtgaacctttcgtggtcctgccgggacacttggggtgggtgcagcatcgtgatcgttgtacagcgtcaagtcctgcccgacactgggatcagcataaggtgcgaacgctcgttttggcccgcaatcgaagctggctgaacggcggcccaagccatgatctgctcgtgctcttgggattgtgtatgagtagtccgcggtggaggatgagcttcctttgctgtcttttcgggtagtatttgttcgtggcatagttccgatacccccgcgcgagcttcctatctgcctcggtgtctggttattggagctactgttgctgcgtcggcccttcgctgtgattgttgcgtagcgatcattcccatcttcgtatccgtagtctggttctgaggacactgacgaggagaaggtgtgtccgcggtaccggccgtgcgaatcggattcttgtgagtaatgactgtgatggtcggtttcgaaggcggaattgaaaagacgatagtcgtccagaacagacgaactagaggcgaattgatcgagcgaaagaagcatgttgtcgacgatcgacgttcgtgtagcatgttgcggggatagagagagatcatgcgggtctcgatcatccgactcactggttctcgctggattatccatgacatctgggaaagcatcgcggatggaaggtcgctctgggtatcctcgtttggagggcttgtatcttgcggtttgggagggtggtgtatggggaggagagtacgcctcccgttgggacattattgcgctaaccaatgttaattattttattccttaggctgatcagatttccaatccacacaaagggaatgacaggctcattgtagtagttgaggggggatggggggattcggagccactcggtttccaacataccagatctcttgcaggtctcacaaggtaattgactaaactgaattcgacctgcagtatccgatttgacgaattgaatggtaattcacttggtcattgtcccacgaggccagggatgtaaaaaagaaagaagatcaaaggagtgtaaaagggtgggcaatagcaagaggaacaagaaaccgggggtggaacgaactcctgagagtcggggaggttaggcgggaactttttaaagcctctccgctactgtattggtacttttttataatatgagacatacatagttaatcaggaagaatttaacatatgatattgaatagaaacatgcgaagggggaaattgcttgggtttttagggatctacagattcaggggtttcatacatgcatattcagggcttatatagttactttaggtcgacttgaatagtagtatgttataagatatggatattagacagcatatatcaatgctctttgccttgcaatccttcaagcacaatctacaatctacaatatgttgtatagccaaaagtacacaagtggagctgtggggatggatcatggagctctttgtatgttgatttccgtgaatagagatagatctccgtagagacagttatagacgaatgcctgtgtagatataagtgaatcccagactaataactagagcactccctatatctctttcacggtatactaccccgtatccatgtgaactagtgtatgtataactcaagtcttatagattggccccttgcagagtggattatctggagaggaacccttttccagcggcaatgacacctgttcagaagagacatgagttgagatctatctagattgtaaatcctagtagaagagggtatcttatacagagtactgtgtccatcaggaactacataaaacataaaatccaaaaatcaacaaatgaccgatatacccaacacgtgatcaagaagatgacataaccgggcccaactcgcatcggatacacgtacaacaattgaactgcattgtgaatgctccgagattgatttccctcctcgaaaacggggtctaagatcatgaaccctcacatctctgtcccccgccaacatgccggccctgccaacttcggctcaacacctgcaacccggtctagtgtccgcatgccgcgcttcttcaagaggtagtaggaccaaagaatcccggcacgagagacaatcactgatatgggacaggcttttcaaattcccacaaatggactttgaaatggcaatttgggagatgacctcgttgctgatcgcacccaagaaggtattcaaatcgatatactaccatgtaagtggtctctatcctaactggccctcgaactatgctgatcatgctatctgatttagaaacgtgagtctacttattattccaaacttggctagtgcctcgattgaacaagcacatacaactggcaataccggttactatcgtcccagccgagcactattgacgccttggagcagaaaccaaaaacacatggcaccggcctgatccgtcattcacctacctactatcattcttcctcctcctcacagccctcgcatggggccttgcttatacgccaggcttcggcgcaattatacgactcgctttcctcttcgtgttcgtgcatttcatcggctcgtcactgctcgtctcgacaattggatactttatcattggccgtctattcggtccgaacggagctgccgcctctctagctggcctgcggggctcccgtggccgaagacgaggtgccgctcagggcttgtttactcagccaggggagaaggagcaattggagtttggatattgttttgacgtaagactccctgccataaattccgtggaatctccgactcactgacactgtcgttgcataggtatccaaccgggccttctttcctctatatctccacctctacgtggtgcagttcctccttctgccgctcctcacccgcagcccgagtaatttcctggctactttccttggaaactcgctttacctctctgctctcatttactacacctacatcacgttcctgggatacaatgctctcccattcctgcacaacacagaacttctgcttgtgcctatcctcatattcgccgttatgtggctagtcagcctgattgccggttggggcattgtcatgcaaggccgcagcgttgaggggttgttctggggcgtgtgaagtagcaagcttcccccgaattatatcctctccctgggatttccattccctgtacgaaacctgaaatatctcttttgtcgggctcatccctcctcgaaaaaaagccagccccaaaatgaggcgattatctaatgctatgggggcgtcagtgtacatgatttcaatttacatgattgcgcatatttcctactgtttgattgattccagatgtccaatgtgaagagtatctcaactgtttgctttgtttttttttttgttgtctagatgtgtaaccaacaattcgacccaagtcatgaccacatataaagcgaaatccacaagcttatttcttaccaactttcttagtcttccccgaagctgcagcacgcaaacgatcctctcgctgctgagcggcatcggcacgctctttggcttgctcgtccttctcctccttctcggccaacttgcgcagacgctccgtctcacgctgctcacggataacggcgagacgagccagatccgacttcgcctcgtcagtcttaccctcggcgtgcagcttctggtaacgttcacgggcctgctgggcctggacggcctcgcgctcccgtcgggacaactgcgagatatccttgaccttagcgggcttcttgggctcagcggcggggtcggcgacgggcttcagggtctgcgagcgggacttggcagtgtggttggggttggcggggagctcgccgtcggattcttccgagtctgaagggggtaagtcgcccggttgggcgggtccttggcctcgcttcttcaatgcggctgccttcttagctttggcagcagcgcggcgctcctcgcggcttcctgcagctgtggatgactcgatcggcttgaactcgtcctcgctggattcctcggagctttcttcttcggatgaagaatcttcgtcacccgatgacttgatttgctcaccaggctcctatgagagggatgttatgatcaggatgctgtacaaattgagttcattggggctgaagttcacttacccgccagagacccatttgattgccatccttgtctaatggctgaagatctctgctgaagtgcttgcctcctattcatcgtctgatcagtttcaagtatctcgtacttatgctcaggcgcacacgacatacctcctcgagtaggcttggagaactttcctccacgaccacggggcgccatattgatatgtaggaaatacttgagagcttgagagctttggtaacaaggctgaagtaatgtatatctctatatcgagaacgagttagcgggttctcattgaggggggtttcgcacacaatgaatggaggggcagaggcggggtgtcgcttcagagttcctccaggatgggatcaaaataacaaatcacttacatggagaattcaaagtagtttaaagatcttcaaatgttgtaaaggatacaaaaattcgaagggaacaagttcgcgagttgtcaagtcaccgcgctcgcattaaatcacatgtggagacgtttttcttctccgtcaaaccacaagtcgttgatttgttaagacatacaacatgcaacatacgacatttgggatatatgtatagcattatcattatatcttctatattcctatatactatctattttatcatattctcattcatcagactcgagctataccagtgcccaccttggtcactcgagccccaatcaacgtcaatccaccaaggaggaccgcagatcccatgaacatctgggcgtacaggtaattgccattatcacgaacaactagctcaccagcaataggagaccctatgagggctgccactgccaccacgctgagtaccatacccatgcgtaccccgatcttcttcatatcagtcgtgagggtgctgagggtcgctgggaacaacgattgaatacccgcagcaaagaggccataaaacacagcaaatgtccatagcccggacaggccgtggactgccgcccagcagtagccaaccaaggccgtcgcgaaactgaacgggatcaacaggttgagaggaccggtgagctgatcagcaagcaggttggggaccaatcgcccgaccaatccgactccgttcatgactaggagcagatcaatagatcgatcacttgacacgccgatgatgttccgactgaaactgccgatgtagaaaaagccgacatacaggccccagaagttcatgaacatgccaatcgcaaacagcaagtagggcagctcggtgaaggcagcccactcgacaatcggaccagtcttacgtggaggaagacgctgcttaaggaacagcacacagggagtcagcgtggctaccgagataaagcccagcgttcgtattgtccacccatatccgacatggggcagcatcttcatgacaacagccgggaagaccaggccccccgtcgcagagcccgatgcaacgaggccaatagcgatgccacggttcttggcgaaataagtcgagaccaaagctagggttgggcagaacatgagaccacacccaattccttggccaacaccctgtgctaggaatagctgccagtactttgtgcagagcgaggtcatgaagatactgaagcattctaagatagcaccgcaggccagagtaaatgtgaaataaccggcatcggtggccctgccggagaaagtgccaataaaaaacaacaaaaagatctggatactcccaacccaggagatatctgagggcggatgtcccagtgtctgggaatagtatgtctggaagacgccgaagctattgatataaccccatgtattgaagatgacgaagtgtgcgagggcaacctgcgaccaagcctgaaatccgccgtccggaggcggcccgagatctttgccagattcccgagtgcgcaccgccgagagggtacggctcaaggcgctggtgttggttggtatgtgggaaatgttgagttcatgtctgatggttgattcttcatctgaggaatggcgagtatggtctatgtccttttcgttctctgtatgttcttcggtcatacttgagggtttcttggatatattggccatgttagaagttgacatggttccttgatgcgccttgtacatgtaggagtcttccaagataacaaaaaacttgtcaaatgagtcaagtcaaaattggggaaaaattcttataacggggatctttccgatcgtcgttcgcagagatggccgcgcccttcggatgacaggtccacttccgaagttgtaagcgtatctttttacgttgcatctatattgtatctatagctaactcctattttccaagttgaatagcctctaatatctacattatacatgtatctatatatcttatattgaccccacactcacttgatatggcgcaatcccggggtccccgcaaaaccggctctctcggatagttctaggtacgtctactctttgtatgtgacatgacatttcagggaattcaatggctttctttctagcacgtaaatacatgtgagtctatacaaaatcatggcaaaaaaacctgtcgtaggaaggtgaaaagcaagggagcataaaccggagccgagctaaacccgtgttggcggaggtaatgcttggatagcaagcaacctttgaactagtgcagtgtcttaatatgggactaatgggccgctagcaatagatcaacccatcttcaagatcgtgtgataatttccggcatgcggacctgaaacggatgccaaggctagattccccgatgaagcatggcgtatacttggctgtggcgggtaatcatcggtttgttggccaaagtcttgttcaaatctcagtgatcttggttggcgctgctaaaaagcatttgaattgacccaataacatcggccggttccaataagtgccagctggcatcggtctgctttgagctggcgcccaccgtaactgagtaaacgtggtcgcgtggtagatcaaacttcttgagggctcggaacatatctaaattgaatgttaatccaggatctcagcatcaatcaggtgggcaattttaccttcatcggtgaagtcatcacccaaacataggatgaagtccggtgccttccccggggccgtgccatattcgtcaaccaaccgggtggcgataaatcccttgttcacaaaggttggccggacctctagattggccttgcctgccatgacttccacatcccatcgtttggcgacagtgtcctccaaagcctttcgacactcgcgagcctggaacgcaccgtactctgggtctgcacgacgatagtgccaggtcaatgctacccgtttccgttcaatgaatgaaccttgtgttcgctctgtgtaatgttggaagacatcaaccacttctttctgccatcccatgtcgcttttctcggctaaattctcccaatcctcagatccgggctttcggataaaacaaccgtgctcggcactcaatcctagttctgggatatggcccatccactcgtccaggaaagcctggtcccgtccactgataatccacacggcatttcgtgggtcagccgataggctcttcagagtacggagtacccgatctgaaggaatggctgcctggggatccttgacaattggtgtcaatgtgccatcgtagtcgaacatgaacagtcgtcggcgagccttgcggtactgcttcattagttttgcgcgatcgagtgcaggtgtagcgacggattggtcaaaggacgaaaggttggtcagtaggcgattgaggaattgcctggaccacatggaaactgtgttggtcaccacatgcttgtataactggaggtgttgctcctttcgctggtcggctggcatagtcaatgcttgattgatcgctccagccaccccgactagatcccacgggttgatgtggatggcactaggcagggtgcccgccgttccggagaattcggaaagaatcaaagggctgtggttggtttgttgacagacaatatattccagactcgttgtgttcatgccatctcgcaccgtagtgatcaagccgacatcggctacacgcaacagagcgaaatactcgcgtggagataagtattgcggatagtactgcacgggcgagaaactcaaagagccaaatcttccgttgatggtcgaaaccaaattggatatttggccagcaatcttgttgtcgtcttccttctcctcttccacgctagttggactggtcacctggatgaggacgactttgtcacgccattccgggtagcgctccaggaaaatctcgaatgcctgtagcttctgcgcgacgccgcgaacactgtcgagtcgatcgcggccgacgatgattttctttccagcgtagagcttgcgaatgcccaacacagtcttctcgatatccggagccccaaaggcggctttttgaattgaacgtgcgtcgatgccaataggaaagacatctactgcaacatgggcgccgtaggcatccaccccggcggagttggactcaaagcccaaaacacgtgtgcagcacgaggtaaagtgtcgagaataggaaaatgtttggaatccaatcatgttggcacccaggactccctccaggatctccttgcgctttgcaagacaccggacgaattcgctgcttggaaaaggcgaatgtaagaagaatcccacgtagatattcgggatacgttgccgcagcagactgggtagaagaaataaatgataatcatggacccagaccacgtctccttcttgatattcctgcacaatgcgatccgcaaacaattggttcaggcgcaggtagtcggcccaccaccgtcgctcggatcggccatctgtcgggccatgttgcttgtagtggagtagaggatataactcacgttcggcataacggcgccatctcccttggtctttcagcataatagtctcttctggttcttctgatgcatccgacaaccacacaggcaatacccggccatgacggcctgagctcaattgttcatcgagtcgttctcggtcctgttgggtgacactaattccctctaccagcggatgagcgggtggcttcttggttccgtccacgggaaccggtgcggcagccttgttcaatgcttggttggcaacaaggttactgggggttagaggtgcgactacagaattgggatgtatttgctgcaagggtgctttcatgtccacatcaggctcgacctctccggtccagcctactaaggtgtgagaccaagatgtctcatcagatgcaagatgtgcaaatgaatcgaacagcgccgaagtaccggagcgcgatttgagcgtctgtgatccggtcagccaatacgatctcccaaatagacggagtcatccacgtacccagtctgatcccgatcgaaagctgagcttgtatggtatgcagaaagcggcactgatgagacggccactcaagcgaagtcctgggtgttctaggcgtggatcagtctcgggagattcagcggtcaagcttaagcggcgcagcaaatctatgccggatgatgctctctctgcagtctgcactggctctgacttagtctcagacgggtcggcggttacagcgttggccctggggagattgttaaagtatgaaggggcctcgctcgacgtcttctccagactgggtgtcgcatttgtcgcttgagtgtacgcgtcatttttgagagcctttaatccgggcccaacgaggacggggtttggctggtcatcgggcacctgcgcggggctctctgattcagacatgacgagcagatgagcagatgagcagtcaagcagtcaagcagtcaagcagtcaagtagtcgagcggtgcttatgacgggaagatggaggatgagatccggtatggtttgattagactgtgggagttagactgcaattgttacatgcaccaaggtccggggaaagcttgacgtcggtgggttgaaaatggggagatgatcaaggctacatacctcgggggattaggactgactggataagcaaggtcgggaggggaatgaactatgacagcaaagccatggacgatgtaaagaagatgatcaaaacaaaaacagatcgactataaagaaaggaggaacagggaatagtaaggatggaggggcaagcggtgaagtaaagtcgtcttatcgagagttatcgagggaaatggcctggaaagcgattagaccacttttcaggacaagatcttcgggttgacagtgaataggggaataactagaaaatagaaacagttcgaagacgaagatgaagagagtatggagggggataggtggatatttcctcagtgctacgtcatgtatggatttctttctctttctatgcgctgtcgtatgaggtcctctatgcacttgtgatctagatggaggtttcgatgtagaacattcatccatgcaggtatacatcgcagatataaaaaaacagaacttgttagaatgcaacccctttgtcacatggcggtttcggcctaaggcatacattctcaaatagttcaagttgtgcaaaatacccttaggaacctgcatgcatcctcggcatggtgacatccactccggtgtcctttgctctcttcaaatgccctaagactgttatgcagcttccgagcctacctttacgcatccgtccctctcacctctttcgtccattccatagctctgttgcggtagccaagacccccgatgtctttgccaacagcctgcgaaagaccctagaagcccatcggtccacaaatcggtctcgtttgattcgcaaaatttaccccgttgaagatcccgccggactctggcggcctgagatcccatctaagagtcgcgcggactaccaaccaaccgtggaaccagctctgccggactcggaatattcgccggatactcctgacccggggtctaaaagacgccagaaaaaacgcgcaagtcttgttgatataccgtctcaccaatcactcatcagtcaacgtggagaagatgcgattcaacctgcagggacaggtcgtccggcacagagtccatggttgacaaatttggagctatctcgcgccaatgccgagatcactctggatgcagaaattcgagcattgcatcaatatctgagcctaagagctcgggaacgagaccgcgtagagaagctcaggacagaggtagcttcacttctcaaaacagtggtcccacatgctccaagagtcattggatcccactgcactggccttgtactggcgcactcggatcttgactttatactcccatatgaagacccttctagatcactagaacgtgatcgaagaccaagccctacgcggcctcagatccaagatgcccacatccgccttctgcgtcaagtccaaagagctctacagcacaccgatatattcgacaatgtcaaaatatctgacaagcgaaacccttcactatcagctcgccaccggccgactggactcctgctacaattctattgtggcgaggatatccctgccatcacggagtatctgcaagattatcaggccgaatatcctgccctgcgacctctgtacgcagtaacacgtacactgctagaggcgcgtggcctttttggctcatcgcaggcgagcgttgggccggatgcgctagccatgctagtcgtggcattcctgaagatgaaccatggccggtttcccgggccaaatagcttgggtgaccagtttcttgctcttctacagttctatggtactcaggttgacctcaagtctgtcggtgtcgccgtggatccccccgggcttttcagcacagacatgttgcctgtagctcgcggggctgatgaaactgcccaccagcgcggtcagcgttctctgatcaacgtcaagcggaccgctgcgggaaagctcaatatgcctctcttcatatttgtgttgtgaaaagcagcaccctgcaagccctgtcactcttgatctcctgctttccagtgcgatctcgggttaccctaatattagaactttagcaaactgccgggccgactggtttctagatgtgcaagcggataagccatgagaagtcatatttagcggaactttcttgttgcgcaacgattatgcatacaagaccctacccactacatgaatgatctaggccggtcgtgtactcggacttctgagttacagagtgcatttgcagctgcgtgtcagcagcttcgtgacgcatgtgatgaatgggcaagcgatggcaatatcaagagttcaagtgtccttgccactactctacaggctaattttgatggactagagaaggtgcgcaatcaactcgcgtacctctagccaaaggaagttgtagtctagcggtagatcgagcgatcggctattcaaaataatatcgcctatacatctggccaacacatgtagaactcgctatgcgatgggtctcgtctatagttttggttatcggagtctctttgtggtcactggacaaagaaacactggatgtcgttgtcccctcggatttctacaacatattcataagcaaagcaatttcgattccctctcttagtttcatctttcctcttgaactcagcagcaagacaaaagaacgctgaaggctacgttctcactcgggggtggtgcccatttgattactaagtctgtttcacgcggacgcgacgcgacctcgggcttatcagttcgtggggttttcgtggcagaaaaccgcgacaatcagtcaagactgacgagtccgttcgctatgctagccgctggctttggttgataactatttcttcaaatgtcatcccgcaagcgcgtgcagaagtctacggactccgacgaagaaagcgatgggtccaaccagccggccatgagttcttcagtacgattccagcaagtataactttaagcagagctaagctaacagtcacagagaaaacgacagcggacaaattcagagagctcaacaaactcggaatcttcaacctcttctggcgctgataccaataccgattcacttctagcagtcaacgacgatgcacttctcgacgacgaggacgagctagagctccgccagacccagatcatacaagaaaaatactcgcatttgatcgacgaggccaatgtgcccgccgatcatggaatcctcgaacgcgttgagtgctacaatttcatgtgccatgatcacttctacgtcgaacttggtcctttgatcaactttattgttggaaagaacggtagcggcaagagtgcgatcctgacagcgatcaccctctgtctaggtggcaaagcctctgcgacaaatcgtggccaaagtctcaaaagcttcatcaaagagggcaaggaaaatagcacgatcatcgttcgcatcaagaatcaaggcgaaggtgcctatttgtcagacgattttgggaagaccattattgtcgagcgccatttctcccgaagcggcaccagcgggttcaagatcaagtcagagaatgggcgcatcgtctcgactaaaaagagcgagctggatgctatcacggactatttttccctgcagattgaaaaccctatgaacgtactctctcaagacatggcccgtcagttcctaagtacatcaagcccggctgagaaatataaattctttgtcaaaggcgtccagttagaacagctcgataacgactaccggttggtggaggaatctcttgactcaattgaagaaaagctcagaacatcagcccaagacgtacaggtccttcaaaaccgcaaggaactggccaagaaaaagctcgacatctctgaccagcacgattctctgagaaaacggatcagaaatatccgaggccaaatggcctgggctcaagttgaagagcaagaaagagtcagtcccaccctactccccgctttgatgattgactgacaagacagatggaaatttcactcacccaacaaatcgccgaggcggatcagaaaattgcggagaccgagtctcgccttactaggtttgatgctgcctttgatgaagtcaccgcggaggaaacagctgccggtgaacatgcctggcgagctgccgtggcagtgaatgaggcccaagaggaaagagacaaaatcaaagagaaattggacagtgagatggccggccggcatgaccttcaggtacgtccttcgagtcaccttgaaataccttctctgactgttttttataggcagagcaacgccagattagggaatatctcaaagcggccgagttgagaatccaagaaacccagcaaaaagtcgatgatgagaatcaacggctcgctgatgtgagcgatggtggctacactcgaaaacaagaggagtgtgaacaagccgccaatgacgcttctgccgccaagaaggaatacgaagagcaccgccaaggtgccgctcgcctacgggaagacattgaaacagccaagcgagatttcaccgaagcgaaaggtccgcttgaacagaaaaaacgcgagattagtcaagcggagaaccaacttcggaacctcaccaaagaaggtggatcgagacaatcgggcttcaatttcaaaatgccggcactcctcaaagccattcaacaggaacaatcatgggaatcgcgccctgtcggcccaattggtcaccatgtcactctgctagaaccgaagtggtcatctattttggaaagagtgtttggtggcacgcttgccagtttcatcgtttcgtccaagaatgacatgaaacttctcttcgacatcatgcggcgtgtccagtggtaagttttaccaggggtcctatattgaaactgaagctgatctgacctgacctgatagcaattgtccaatcttcattggctctggtgggcgtttggacacctcagcacatgaaccagactcccaatacaagactgtgttacgaacacttcaggtagccaccctctcccgttccacgattcatggaacgtgctgacctttcagatcgacaatgaattagtgaggcgacaactgatcatcaaccatggggttgaacaaatgctgttgatcgaagacgtaaaggaagcctccgcagtactattcgacggtgcgcgaccaagaaacgttaagcgctgttactccattgacgcaaaagatcgacgtcgaggaatctatctctcatacagccgagccggagaaccgagtcaggctcctgttatggggtggaccgatggtccgcgcatgaaatccgacgtggccttgcaaatcaagtaagtaagcctccttccccgaaacctgtaacagtggctgatggctctagcgcacaacgcgacatcattgccgacctccaacgccaacagaacgacatcgaacagtcattggtaactgcccggtcacgcatcgaagcctgcaaacaggcattggtccgacacggaagaattgagaaagatttgcaaattcaaatgcaacgaatggaagatcatgccgaggcacttagagacgccttggataaagagaacgccgaggatggacgcattgatgcccttttagcagcattgaaggaagccgaagatgaaaagctgctcaatgagggatcatacaaggatagtgaggcagccatgaaaaccacattgcagactctcaaagaaatccggcgagaactggccgccaaagattctgaacttggaaccctccgagaaagactacaagttgctgaaagcgagcaaaatcttgtcaaaacgaaaaaaacggaaactctcgacgagaagaacgaagctgttggacttattaaccaagataaacagaccaaggctgaaatcgaggcgagaaaagaagcgataaaagcacgggttattgaatacaacgaaaaggccaacttagtttcttctcgagttcctgtggacgaaggagaaacacccggtagcctcgacaaaaagcttgataaattaagccgtgatctggatcgttacaatttggagtatgtctcttgcagcttagcgttagccataaaactgacaatccataggttgggaagttctcgagaggaaattgctgctgaggcaacaaagactgcagcaacttatgatcgagccttgcagcaacttgatcaattctcggccttgagtcgggtaattacccccttgttttgttggtttctttggtctaatctaatattcgttcaggccctgaaagataccctccagaaccgtaagaagagatgggaaatcttcagggcgcacatctcgtctcgagccaaagcccaattcacctatctcttgagtgagagaagtttccgttggcgggctcctgccnnnnnnnnnnnnnnnnnnnnnnnnnnnnnnnnnnnnnnnnnnnnnnnnnnnnnnnnnnnnnnnnnnnnnnnnnnnnnnnnnnnnnnnnnnnnnnnnnnnnnnnnnnnnnnnnnnnnnncggcttctggccgaccatgccaacaaacttctggatctacacgtaagcctgttcaccagaaccccagaatagaccgatcaatgctgactactgtctaggttgaacctgatatcaccaaagatgatagcaccgggagagatgcaaagacactatctggtggagaaaaatctttctcacaagtctgtctgttgttgtctctctgggaagccatgggatctccaatacgttgtcttgatgaattgtaagttttgttcatggtatggtttgggtcttcatgctgacttcgaaagtgatgtgtacatggatcatattaaccgaaagatggcgattgacatgcttgtaagtgtcacttctctttcctagggctctttactgactgacgaatgttctagatggttgccgctagacgatctatcggacgacagttcattctgatcacgcctggtagcaagaccgatatcaccatctctgcggatgtcagagtgaaggagttggcagagccagagcgtggccagacgacactaaccttccggcgctgaactcgtcaattctcggttaatcttatttgcagcgaaatacccttaggaaatgccatgttcttgccatattttaaattagttccacaccttgtgtcatgaataaaatcgtagttgtagtcgagtgacacgtgaccataaccagaggaacgtttagcttcactctttacctcaaacctcttcgctccccgccatcataatctcaacatctcctaccttcgtaccttttttcccctatttgtcaacagagctggtttataccattctttattctatctgtgaactcccccagctttggcatcaaagatctttcttggttccacacagaagcttcatatcattgaatacctgatctcccatttcctccaacccgaccttattggtttcgacgaatatctctcttctcccctcccgtttccgttacctcgaacctctgccaaaacattcctattctaacttccgcgcaaccatttcacacaccttgatcgcaaacaaaatcggtcacctcacttgctccccacctccttagcaccttatcgtcacaatggccgacgcgcttgctgcacaactcagcaatactaagctgtaggtcgatctgtttccttagtccctaaaacaaatctgactagaccagggaagcaacttcagagcaaaaactgcaggacacattgaatctcccccccaaagatactcgcccacaaactgaggtgaatatattgtgactgccagtcaatgctaaatactgactttgactaggatgttactgccactaaaggcctcgaattcgaggacttctacatcaaacgtgaactcatgatgggcatttttgaggctggatttgaaaagccctcccctatccaagaagagacaataccagttgccctcacaggcagagatatcttggcccgagctaaaaacggcactggaaagactgccgcctttgttattccaactctcgagcgcataaaccccaaaagtacaaagacccaggccttgattctggttcccacacgagagctcgcactccagacatcacaggtctgcaagaccctaggcaaacaccttggtatcaatgttatggtcaccaccggtggaactggcttgatggacgacattatccggttgaatgaccctgttcacattcttgtgggaacccccggacgagtattggatttggctagcaaaggtgtcgccgacttgagcgaatgcccgacatttgtgatggatgaagcagacaagttgctgtctcctgaatttactcctgtcattgagcaacttatgtccttccatcccaaggatcgccaggtcatgctcttcagtgccactttccctttgattgtcaagtcatttaaggacaagcacatgcgtaacccttacgagatcaaccttatggacgaacttaccctgcgtggtatcacccagtactatgctttcgttgaggagaagcaaaaggttcattgcttaaacactcttttctccaagcttcagatcaaccagtcaatcattttctgcaactcaaccaaccgagttgagcttctagccaaaaaaatcaccgaactcggctattcgtgcttttactctcatgctcggatgcttcagcagcaccgtaaccgagtcttccatgacttccgcaatggcgtatgccgcaacttggtttgctctgacctgttgactcgcggtatcgatattcaagcggtcaatgttgtgatcaactttgatttcccgaagaacgcggagacttatcttcaccgtatcggccgttcgggccgtttcggacacttgggtctcgccattaacctcatcaactgggaggatcggttcaatctgtacaagattgagcaagaactaggcactgaaatccagcccatcccgcagaatattgacaagaagctttatgtctatgattctcctgagaacatccctcgacccatctccaaccctccacctcaaactggagctggatccgtgaacatgaacggagaccgtcaacctcgtcggaacaacaacaatgggcaaccacagagtcaacaacagggtcaacagcatggtcaacagcatggtcaatactacaataatcgaggacgcggttcttatcgtggtcgtggacagggccaacgtcgtggggcacaaaatgacgccaaccggattacctttggtcaaccaaatccgggtcaacccccggcgcctctttcttaggcccggacacgcctgcacaacacttttcatatcgctgcgctttggtttcctcgattctcttattctattccgctctatcttcgagatcttgtcgggctatcccggcattgattttccggtcataatgatacgggagtgcaatgtatcatatgtctttttccattcaggtcccttgtccaatgagttggatccttgaggaagatgcattttcggcgcctacgctcttcgttttccgaggctgtattctgtgtttcaaggacttgaaggatttgcaaggatttgcaagggcgttctacaggacaagcgtctcatgtggcttttttcccccatgggctcctttttattttcccgacgcaacgagtgatgatctcaccctttaccaaccttttgttggcagcctggagtcctcccaccactctaccatgcttaacctcattcctgcctacgctcactttgtgtgattgccgttgtcaatagacacggtgcacacaactctcccactctcccactctaaaaaaaacaccaaaaaaagaaggaaaaaaatggaggagcactagttgtctaacggatctatttatatcagctagtgaattgacaatatccctccaatttgttccactgtagtaagttgtaggacctcgatgcagtcttcgtgtgtatatattattcccatatgaatgcgttttgtaaaggaactggtctcctacttccctggctgattccactgattccatagatccatcgactgcgggaatggcacgtgccgagggccgtatattgctggatctccgagttcggcgaccgcaattcctccaaaccaccaaaaagaaaatggcgacggtgaataaggatcacaagggaaaggtttgttctccagccaaataatacagtccacttgaagctcaccaataattagcccagtgcccttcgctccatccttgcggggtccaccgccggagccgtggagatcggtaaagagctcaatgacccctaccaggccgctagctaaccgtatactgcagcgatcacatacccggccgaatgtatgaccctttgaatgtcttccaacgatttttgctaatgctacgaagttgcaaagacccggacgcaactcaatcgccagcttacccacggccaaaagctaccatggccaccgtttggaagccagtggtatgcaggatgtacaacactgattatcggaaactcgctcaaggccggaattcgtgcgtctaccttccgcgattgtctggggcagcgctgatgtatactaggattcgtcgctttcgatgccataaaatcggttctccaggatgagaacggcaaaatctcaggaccaaggacggttgttgctggatttggtgctggattcaccgagtctcttttcgccgtcaccccctttgaaagcatcaagactcaattgtacgttttctgtcctatttctggctagctctactgaccgaattataggatcgacgaccgaaagtctgccaaacctcggatgcgtggttttttgcatggtagcaagctcattttccaagaaagaggtgtcaagggtttcttccaaggctttgtgcccaccacagcaagacaggccgccaactcagcaacccgattcacggcctacacaacattgaagcagcttgcagagggctatacggcgccaggtgaaaagctgggcactgcagccacatttggaattggtggaattgcagggctcatcacagtgtaggacttgatctctaaagacgatgggcaaaaagacacatccaagctaacatgactcagttatgtgacccaaccattggatacggtcaagacaaggttagcatccccacgcgcgctaatggtatatataaggtcctaactatattagaatgcaatcaatcgaggccagcaagcattacaagaacagcattgtttgcgcaacaagaatcgtcaaggatgaaggtgtcctcactttgtggtctggcgccatgccacggcttgcgagattgatcatgagtggaggaattgtgttcactatgttcgtgaccaacccaaatcgtactatgaatgttgctaaccgctgggcaggtatgagaagactatggaagggctggacatcttggatccggagcgaaagtatttgtagaatatcaatacatggtatctctgtacatcaaaagaacaactctgctatttactctttgcgtttgccatgtcctcggcaaccatggcctcaacttccctatcggctatccaagcccgcacactgtccatcacggtatccaaaccatcaccgccatcaagaataccatccagattgtggacggtgatacctgtacgatggtcggtgcagcgactttggccaaaattgtaagttcgaatcttatcacctcgacccattttggccacaccacccaatatacctcgtctgagctgcataagctcttgctcacgagcttcttgccgggcttcggccagctttgcccgtagcatctgccacgccttcctccgattggcctgctgggatcgttcatcttgcatggagacaaccgtatgagtagggatatgagtcagtcgaatggcggactcggttttgttgacgtgttgcccaccagcacctccagccctcatcttctcaacccggacctcttgcgggtcaatatagtaatcgctgctggggtcttcaaagttcatggcactatccatctcactgccgtcctctgggaaactcggcaagaccattacgctgacggcgctagtatgggtgcgacccttggtctcggttgcggggactctctgcaccctatgtacccccgattcagtccgtaatatatcgtatgcaccattggcttcaatttcaattaccgcttcaatgagacggtcgtcggacgcgccgacctctgtgtcctgcttcaatattgttgggcggaggccccttctggagcaaaaggcaacgtacatccgtaacatctcaaaagcaaacaagcctgcttcatctccacctgcaccgggtcggatttcgagcaaacaaggaaggtctgcaaatggatgtcgcggaatgagagccttcttcagtcggtctgatatcgtaggcaaggtatcgcgactgctctcaaggtcttctgttgccaaagaccgtagttcggagtcagtgtcggggtcgtttaatagggatttgagctcgacgatagactaacggagttagtagggctccaacaaagcttcccaaggcgcttacatcgttggcatggacccattctttcaagatatttgcaaccggtgccagttctccggctcgtttggccgttttcgcatcaaaggattctcccaatcgctccgcaagctttgtatgttcatctgcaagtagacgtgctctgcttaaaagagctggagacaaggcataatcggatgctacgtcgcaatttagcattgatcagaaaataaccggaccggtcttaccggtatgtacacctcgcaagggagacagtttcagaccaagcctaggccgcaagatatttcgacatattgacttgacgagcatacttcgagtcagagtgtgaagaccaagatccggagcgaaagcgattggagataaattccatgtcacatgacggtaacggatcaatacgaggcgtaaaggccacggagtatgctcatccaacttccagtttcttgttcattgttcattgcgctttgtacttttctcttttggcctaacttctttggattatgcccctcttcttgtagtcctagggagactgattctacaccaaacccctcatttacatatccattactgcattactgcgtcgcatacccccgagatgctcgtttcattggaattattcacggcctttctggcttgtgtctcggctggatatgcccttcaaatatcgccagatacgcctctctccgaattgatctcttccgccaaagcccacctcgcgcagggctcaccccgagatgccgtggtatacttcgatgccgccgtctcgcgcgatccaaccaactatatcaccatcttccagcgcggtgcggcttatctatccattggcaaaaactcacaagcctcaagtgactttgatcgagttctagaactcaagccagactttgagggcgcccttctacagcgatcccgcttaaacgcacgctccgcgcattggcaagaggccttgcaagatctcgagcgggccgggaagaagtcgacggatgattacaaggaactagaagccgcacgggatgcggccacattggccctcaatgctgaaaagcaaggcgcctgggacacgtgtgtctcggaggcaaatgtggccatcctaaaggcaaatacagcactgcctctgcggcaggctcgagcccattgtcattttgaaaaaggcgagacggaggaagggctcagcgatttggcacatgttctgcaaatgtccccgaacttggtcgaaactcacctacaaatgtcgtccatgctgttctactctctaggagacagtgaccgtggccttgctcaaatccgtaaatgtctctataccgatcccgactcaaaatcgtgcaaccggctctatcgacgtgaacgaaagcttgccaaacagctagaaaaattgcatactgccctagactcacgcaagttcagcaatgcagcaaatctcatggtcggcgatagtgataccagtggactgatcgcagaagtcaaggccgatattgaagaagcaagacaagttaaccatattcatcgcctggcacccaataatctttacacattcctagtcgagaagacctgcgaggcttaccgtgaagtgagtgcccactacacatggcttggtttctgtcactaacatagccagatgcgtatgatcaaaaaggccggtccttactgcaccgaagctctccagcttgttcctcactcacttgccgggctcctctataaagcccagattgctttggacgaggatcgattcgaggacgccatacgtacgctcgaatcggccaaggaacaccaccccggttcccaagaggcgcaatctctccaacagaaggctcagaccctactcaagcgttccaagcagaaagattactacaaggtccttggtattagccgtgatgcggatgatcggacgatcaagcgcgcgtatcgccagctagtgaagcaacatcaccctgataaggcccactcccagggtgtaagcaaggaagaggcagagaaaaagatggcggctattaatgaagcctacgaggttttatccgaccccgaactccggacacggttcgacaatggcgacgaccccaatgattctgaatcgcaacagcggggcagtccgttccaaggcaaccaattcggtggtcaacagttcttcttccaacagggtggtccacagttccagggaggtttcaaattccctggtggattccgctgatcagattgtcttttgtgaaacataccaggtgttcgtggagtttctcgatgtatttgggaagctatagatcttttgaagcccgcatgagggataggtttaggaaagcacatgaactgatattatttctgttatttggatcgaagtaaatggtttgcaatctcatcctcgtggagcatctgtcaagggcacgtagctcacctggaagaccttctccctgtgaatggatccgtcttcctttttatccaccacccagatatattgacccccattgggatcaatagcaccctcgctgtcttccgattccaccgggatgaatagtctcccgggagcacgtagctggtccaccagagttggatgaagcttgtcggctgcggcgccaacgtggatggcgtcgtagggtgcaccttctttccatccaagacgtccgtcgcccgtgataaacttcacggtgccgttggtctggaacgcactacctttcttggacttgttcatgttggaacgagccatgtctgtcagctcggggatatggtcaataccaatcacctgtccctgggcgttgccggatgagctggtcaccaaattggcaatgacatgggtcaggtatcctgagccagatccaacatctaacacccgggcacctggtttgagataatcaatcagatactcacatgcatggccatgcatgtgcggtgctgatatggtggccccgtatccaatgggttgaggcgagtccgaatacggccgtgatggagcataatgggctcgatcaaccttggtcatgttagaggtgacaatgaatcagatatatatcaatatgctcacgcctatcatggcatcttttacacgctcattctggatcagtccggccttgaataggttctcgatcaactcggtgttggtagatccagaacaataccacgccatggtcatagcctgtgttgctttgtggatgaattttggtttgtatggactaatcatggactgaatgggtgttggatggtgaaagagagaagagttactgtccaggtatgtttggccaattacatagtatgtacatgtgtgtgactatatataaatgacgccatgatatctacattttcacacgtgatacctgaaatagtcacagttgcagtaaaaactatcccactaattcatacagtctataatgttatatctagtcaaactaaatttataatcctaatataccagaagggaatgcgtgcaatcacacgtagaatggctacagagtaccaagtcacgtgaaagtgatatcaaaacatcttacaggtccgtggacatcgccgactcatcgcgccgactacgcgcgttgataaaatcgccgtgggaacaattacacttacagggcatcatggacctctataggactattcacatacccctcatctgatattctcccctggcttcagccatcagtattgaccttcaaaatggcggaccgaggccctggcacagcagcgactgtggatctgctgattctcgactacatggtctgcctatgtatcagcggactcctagaaggtatttcacaagcaagagcatccgaggacattgaatactttgcgctttttgttgaacgtaagcaccagaactgccagcaatggaccatgcatactgaatatggctctagagctccaccggcggcttgccctccatcacctcgaaagccccctgccctgggacctagatttcaaattgcgcatcttctacatgtccaatctatttctccactggtacccccccaaagactacgacatgggtccctttgttcctctgtctgatatcgcagtccatttcttggacctatgcctcgatgcagtcgcccacgtatcccggggacgctggttcgacctcggtgctcacttcatggtccatgcgatgttagaagaacatgcgcgtttccccgaccagctagacgcactctgcaactggagaaccaacgacagtgaactcgatatatggtgggaggtcagccgtaactggttccttgggcacatgccacccccatttggtacggcgggtccaatgagccaagcagagattaatgaggggtttcccctccaagcactgcagcatcgttatgtcgagttcttcgaggacctcatggatgtactggatgtgccccttcttcttcagctggagcaaggtcagctggaaggtttgactcgggaggagacccgacaggttcgagagtattgtggaatttaatcttcctctacacaacgatacgagaaaatgcctttctatgtgcttccatgtgtaatgacgccaagtcagacacgtgaaggatcatgagttaatgcgcaacaccacatgtacactaactcgatcatattgatcgttcaatcttgatcaattttaaccaattcagatcgaaagccaatacacacataagacaggaatagtacttagagcccactacaagacccttgacatggcatttataacttggaacaataataatttacaaagggcgcaaggccgctctaggtacgagaacacaaacaacaaaaggcgcgtgacaaacactcatgctacttagccgagcagcatgcgccgggggtcctcaatgtactccttgacctgcgatgggattagtgattgattcgggcgaacgaggaggtagacataccttgacaaggaaagtaacggcctcacgaccatccaggaggcggtgatcgtacgtcagagccatatacatcatctaaaaatatcagtaaaccgaagaatgtgattggggttcctgtacgtacggggcggatctcgacattgccgttcacagcgacaggcttctccttaatggcgtggagacccaagacagctagacaaaattagacctgaacctcaaaaatagtacgagggagctcacctgtttggggagtgttgatgattggtgtgcccatcagcgagccgaagacaccaccctgggatgagttagccatgttattgtgaaacacacaaagagacgaaacatacgttgctgatggtgaaggtaccaccggccatgtcttcaatggtcaacttattgtcacgagcctaatacaagtcagtaagttggacaccccctctagaaaaacaactgctcaccttctttccgagatcggcaatggccttctcgattccaatcatatccttgccttcactgttacggacaacaggagtcacaagtcccttttcggtggcgactgcaacgctgatgtcaacgtaatcgcggtagacaatggtgtcaccgccgttaggaccctcaatagaagcgttgacagcggggatatccttcatggcaagcacacaagcacgggagaaggcgctcatgaagccaagcttcacaccggtcttcttgagagtatcttccttgtacagtttccggaactccatcagcgaggacatgtcaacctcgttgaaagtggtaagtgaagcggcggtattctgggactgcttcaggcgctcggcaatacgcagacgcatacggttcattttgacctagaccaaaattagcttaagcttaaaccaaagtcaaaggcccattggcggtcaacttacccggcgttcctcgcggttaccaatagaagctggctgttcggcagcttggggcttaggagcttccttgggaggcgcagccttcttaggttcaggcgccttgggcttctcggtctcggtgggggcgggcggggcctccttcttaggctcaggctctttcggctcaggcgccttgggttcgggctccttgggcttctcggcgccctcgtccttctttccgccttcgggagcggcgccaagctcgatcctgacgagatcctggccgacagtaacggtatcttcctcgttcacaaggaactccttgataacaccagaatccggggcattgaccgagacatcaatctgaacagaaaactcacgttagcgacagtactagttgcgagagacggaagcggagttggtatttaccttgtctgtttcaattgtcgcaatctcctcgtcgcgctcgacgaaatcgccaacctctatatcagaataagcaaatgtcaaaatgttcaaccacagctaaagcaccatacgttttgagaactgcttgagggtaccctctgtaatcgactcagccatgttggggaccttgataatggagtcggctaagcattattagcaattgaccaacaagactgcttaagaaaagcatttaccataggtgcgaagctgatggcctcccagaggagcaagattgagcctcgagacattgatgctatagggttgtatgagccaaaattgcgacagacagtaatgagattcgaatacttacccggaggagacctgcaacaagcccgaagctgagcgagccgaagccttccgcgtaagggtagacaatcccttgacattgcggaactggcttgctccccgaggagcggttctggccacagccgagaagcgttggcccgagaggcgcgcaataaagattcgagaagccatgatatgaattaaagcaaactttatacttgaaaaaaaccgaagcggttatgtaggagagaggaagaacttcaactctttgaaaattagagaaagcaggaaagatgaagctcggattaggtcgggtcaaagtaaaccgggcacccttccggcagaggcggaccattattctctacggggacgggcagtgaccatttgagcaaatccacgccgagcgaattaggaagcccagaatagtcaacctgacgacattgaagccctcaaccccaacccattgtctatcaggagccctaacgatctccaaggttgtcatacctgtttatagatctgtgtatcaacgtacacctttcttgtttccctcttcctcttccagttggccggaattggacccgggacaaaacttgagcacaatgtccacctctgctgttaagtgagtaggccggtgtccccctagtggactgttcactgatctactctaggtcgctctaccggcgctccctgaaattgtcttttgactgggccgtccaccggcagctctggcgtggacaagcagtctatatccgatcccttttcgacgccaacaaggacgtccgcgatcctcgccaacaacaagtatgtaaaaccgcaacttatggctggcaagcctaacacatgctctaggttttgttgcgcgagacagagaagctgttggagacctggaagcaccctgacccataccacgcacctactgcgcctggcggcaacaaatgggagcgcaacctgccggccccaatcctgccatgtatgttcatatcccccccccccccccccccccccccccctccacccaaccctcnnnnnnnnnnnnnnnnnnnnnnnnnnnnnnnnnnnnnnnnnnnnnnnnnnnnnnnnnnnnnnnnnnnnnnnnnnnnnnnnnnnnnnnnnnnnnnnnnnnnnnnnnnnnnnnnnnnnnnnnnnnnnnnnnnnnnnnnnnnnnnnnnnnnnnnnnnnnnnnnnnnnnnnnnnnnnnnnnnnnnnnnnnnnnnnnttcataacccccccccccccccaatgcaacattggatttgcactaaccctgaaacaatatagatgcccaacctcccggtccacactaagtaatatcgcaaaacacaatgaggattgggccaattgcaaacatgaaatgatgcaacatgaactatgcgtatcttccttgcaaatgtagagtactcaaatcagaatctaaaataagcaatttcgttcatgtacaatagccaccacgagagcaacaagtctccaaggatcgcgtttatatgtacaatgtatacaggaagtacgaaaggcaatatagtaaactttttcttaacaattgaaatacctggagttttcattgatttgggctcatgcccagagctagtatccgaaagttgaaatccctcaagcgagttaaggtcgtcggtatcatttcatgtccgtagacataatgtacaaccaggaaattgatggaagaaaaaaagaaaacgcagagccataacgtgcccgtcccataaccccattatcgtgtcaaagaaccaatccgcgccggaaaagaaagcaaacaaaacccgcgaaaaaaaaaagaaacccttacagctcctggctgcccttgccggccttgggagtcttcttggggagaaggtctgagattcatgttagcatggtggaaaagaaacgattggtttgagagagaacgtactctggtgaatgttggggagaacaccaccctgggcaatggtgacgtgacccagaagcttgttcagctcctcatcgttgcgaatggcaagctggaggtgacggggaatgatacgggtcttcttgttgtcgcgagcggcgtttccagccagctcgagaatctcagcagcgaggtactcaagaacagcagcgaggtaaacgggagcaccggcaccgacacgctgggcgtagttgcccttgcgaagcagacggtggacacggccaacggggaaggccaaaccagccttggaggaacgactgaagatgttgatgtcagtatgaaacgcatatgtaagaagcgaaatgtaaacaactcacgactgcgcgttcttgctgccgctagccttgccgccggactttccgccagtcattttgatggttggatttgaaaaagggggggttggggaaagaaaagaagttgtttgttgaagatgaaaagcttgggttatggtgtaaagtcgcaagagcagttgggagagcgtgtggaagcgaaggacctttataaggacgcggtgagggtgacgttgggacggcatcaatgggccctccagatcacggcctcgcttagacattgtagccaatgatcaatcagatcagaccttccgctttgggaatgatgtggtaagataaggccattaccataccggacagtcagctgactgtgatcctaccccacctttcccgtctttcccaccttaagacgcgtcaatgtcggtttaatcatacagatcataccaggctcttaccgtattgaaattcgtcctcctttgcaccccctccaggatcaactgacctttggaacacgagtataaagacgctgtctcccctcgtcaccgcgtctctctaacttacccttccacattccatctctgtttcccacccacacgcttcatccatctttacttcaactcttccaactctttttttcccaaccaaccttttttcaaatccacattcaaaatgccccctaaggccgctgagaagaagccctccaccggtggcaaggcccccgttggcggcaaggcccctgctgagaagaaggaggctggcaagaagactgccaccactgccactggcgagaagaagaagcgcggcaagacccgcaaggagacctactcttcctacatctacaagggtgagttgattcctgaacgcgacatcagtcttcaaagaaaaaccacgcgtccatactgactccattttcagtcctcaagcaggtccaccctgacactggtatctctactcgtgccatgtctatcttgaactccttcgtcaacggtatgttttcctcttcgcgaaatgcacgcgtttacgcgttcttccacgtcacgttttctaacttcattttccagacattttcgagcgtgtcgctaccgaggcctccaagctggctgcttacaacaagaagtccactatctcgtcccgggagatccagacctctgtccgcctcatcctccccggtgagctggccaagcacgccgtctctgagggcaccaaggctgtgaccaagtactcttcttccgccaaataagcggtttctttacgttttctttccagcttgcttttgtttttactacctcttgatctgttatgggctctgaggtggtcggttatgggtgttttgcgggtttctaatgcgtcatgggatggcttgaattttcttttccccgatgggtgatttttttttgaatggttaccactcgatacgtgaatgcggtgtaacataactcgggtctggggcaggcatggattggcctcccctactagaacgcgaaattccaaatgcttaattgcattgcatcatcattctatttctctttcctggtaaatgttccaagccaactaaaaatgaacatgggtgcctttcatctcatggtttgtctgttatcttactccatctcatctgaatcatccagcgcctcaacttcatccagagcctctgcccgaccatagccatgatctggctgatgctgactggggaagatgtgcacaataggctgtccaggcgtggattggattcgtttcttccagtcggcccaatcgtcttcgtccttgataagaaatccaatcaacatgctggggtccatgtccttgatatggattcgccgtagtcggccggtgtaatagctatccaattcctctttggtgtagagcccatctggtcggtatgatgttgcaggtcgggtggtatgcgggtcaaggaaaaagaggtggcagtcttgagcagccacgaaataatgcgatgccgatgggcgtccgctgtcttggtcagcacacgctttatatcagaacagacgcatggacctaccctgcaatgccaacggattggggatatgtcagtgcggctcggagtccatcccaatacgctggggtgacattatcgatccccagcctagttccaatcaagatgagcgtgggttgaattcggcctgatctatcgtgggccacgtgtgcaaatttgtcttcatagacgtccgatgtgtcattggttacatagaccctgagttggggggcctcgctttgatttgaaagtagcctatcaccatcagcatcactctatagctcgagttttggcaacactcactggatacatttagcagttgccgatggcccaaaccattcgcctgggtatttcccgcatgattctgcaccgcgatcgacaaattgatgtatagagaatggagcatcgggatgatcagcgaacatcgatattagctttgactcctcctccactttctcccctcgacgccagtctagtatatctggttagctcttgttgtggtgtattttgggggcgagggtatgatcggaaggatctctcacctcgtcctagtagtaaaactgaaaatgtgtttgccaaaaggctttgtccagatctgatcatgcagccccaccctgtatctgatgtaaagccttgggggtccatcagctgacttctcagacgtactcccagtgtcatcgaggatgttgcttctggtgtctttgttcgtgggattggtgtaaagtttgatcgatatgtgatccatattctcgatccaaaatcagagagaaaggccttgggccattctgtgtcattcaatatgctagcatcgggctcttctggggagctgtgtgggttgttggctatatgggatattagaaggttggtcttggagttatatcttcacttgagcaaaactcactgtcctggtcactgggtggttgcgggggggcatactctctgcctaggcaccatattgaagctgcaggtatgtcatttctgggttctgggtcccagaagtattgtactatgcgtttgcacttttccatgtccacggtcatggttggtgctgtttttctgccgtggacttgttgtagttgagggtaggtgagtcaatgttggaggtcagtcagtagtagattatatatatctcctggaagataacccagtgatttgaaaaccaagtgagtcaacccaggtcaccataagaggaaccgaggaaaaccccaaaccaaaaataatagagatacgaatgacaaccagtgaaatatctagacaaaagaagttggatcttccctttctcaggacatacgcaggtgagggggaagtcttccgtcacgagccaagacgtcaccgaccaactcctatgtatgcaatgagtgtgtaagtctgcactctatacatttacatttacacttgaaattgtcatttgaatattaataaaaacaattaaaaaacaagatcattcttatagaatcccctatattattgttaccctttgtagaatatctgtcaccgcccggacccaaaggcaaaagaatgaattcccccgtctgcttatttttttcccatcaacagttcagattcaccatcacctatggcccgccatgggaaattcaaggcccgtagcaggcgggcaccaccgtgtagaggtaaccagtgtgctcctgttcttctgatgaatactaacttattcaagacccaacgccacaccagtttaccatgcaggaagaagctcagaacaccgaaacccatcagcgttcatggtcagatagcaaccttcgtcacaaagctgttcacttcgtgagcgcaggaagcttgaagccgacattggaacaagcagacgaggaccagacaaaattggacacggaccgtgaagaaccgaacaccgacaacacaccggacaaaaagaccgacattgaggtctcgttcttcttcgactcaaagggacaaggagtttttcatacagagcacccagacccagtattgcagtccaaattatcggacatagacgactcgagtgaagatgaggttgtgttcaccggccgcaggaggaatacaaaacccgttctcatcgaaacgcatcagaacgagattgaagaaatggtgcagacgaatactgttgcatttatgcagaaaccacagacaccaacattggactatacgtccggggacccctcgcccgccgctacacctacagacagccttgaatccaatacagagagaccagactggccacagaaagaagagaccgacccactagccgactatattgccaacatcgacaacgactaccacgaggtagtgacctacagtgcaaatcttgaactagaaggtggcattgacgtcgaaaaagccgcaactcaactagacctgtcggcttcaagccatacagggtccaaaattggatcaccaagatcactagctcaaatgcaaattgacatcgaacatgattcaatttcaacatcaagcgaagacgacgaggacgatatggtcatctctggatcagacgaagacacacttgaagattttgtgttgctggaggacctggcgaatggatattctgggtccaccaagaagggttcccgttatggaaaaccctcatttcaatcggcgtcggcactggcggatgctcttgagtccgactcgtatttcgggtttgacgtaatggactttgaccggccaagtctacggaaaaaaaacaagggcaagcaagccatccccggctcggtactatcggatagtgaattcgagctacatgaagtctggcagaacgaccggaccaaaaagaagatacggaagatggagcgggcagaactccgagcgcaaggactactgggcagaaaagctgggaacccagacctcaaggtcaagtatcccaaggaaatgaacatggaggaattcatgaccgagattcgctcattcctcatgtctgccaaaaataggttcgttttatatctgctcattctcattcacctagctaatccagtatagcctgtccttgccgcccatgaccaagcaacgcagaaagctgatacatgaactggccaatgcgctgaacctgaaatcacagtcacgcggcaatggactctctcgcttcccggtccttaataagacggcgcgcaccccgcgatacacaccaaagactatatctaacgttgacgagctcttatccgggaggaagttcaaccgtcggttgttcaaatcatggggcacggaagtgccaaaattcccccaacccaagcgtggaaagtccggtgctgcttcatatatggatggcgatgtggttggtgcctctgctccagaaatcggagctgaaaaccgagggcgggctatgttggagaagatgggatggagtacaggtactgctctgggtgccgccgacaacaagggaattctgcagcctgtcgcgcaggtcgtgaagaactcacgggctgggttaggttagatctttggggttgtgtgtggtaagaagaggaggatttccagccggcatatgcggcctcgttcaactagagaaaatataaatgtaagactcgacggcaccttttcatcttttcattatttaaagaagaaaaaaagaagaagaagaagaagaagaacgggaaatgagcctcacctacgtgtttgttcctagtgttttctccccttcttagcaagagaccctttcaaaggttgtgcgtgatcgagatctctaatatgatcgaataatttagacttggatgtaaacggagcctggcaatttgcacaaataaacccagtgggttgatccgcttgtcttgcggcctttttcgcccgtttctgcttggccttgcccattttgagagttggtgactgctcggtgaggtccgaagagaacggacgaccagggatgtcagaggagtctccggcacccgtggacaaagaatccatgtcggtgcggagtctagtctcgacatattccctggaggcataatcgtcatcgtgcgaagacgttggggagcttagctcggaaagaggaattgtttcctctagaccatgtgaaatttctcgatcctcagcatcaatgtcatggctctccaaggaggcatctgataccacatcgacctccgaggcagcagaaaccttatattccccgacatcaacgtcgtcaagaggtttagttgcaactgcattggtacccgagtcatcagcagactccaaatccaattcatcattctgcattcgcatctcccagcatagctgtttgactgccttcaaatgcttcttgctacgttcgtgcgcctcgaattgcttctgacttttgaaatatttgtgacatgccacacattcaaaactctcgacttcgctctcttcgctcctctcctggtcgtcatctgccaccggttgctctgattgggcccactcggggaggacatgatcccgcatcctggcttgattcacagctcgtgaccttgcagcttgtgcagccacagactggcggagggtttcttggcgttgagcttcactttgggcgttgactttataccgcgggtcacgtttcttgacaaaggccacgagagacctgacagcatcgttaaattctcggatgccttcctcccgaagacgtctgttctccttttccatcattcgtcgtacccgacgatcaggcgcttcagaatagcgatgagcatctttccatgcgaatgatttttgggtggaaaatccggtccatgcagcatagaagggtcgcacaacggtctcaaaatcatcgtcaccagatccaaatgatggatattcaataggatcttgattctcccactgacaggccaatctttcttccaccacgagctgttcgaattgctctcgtaaaccaccaaagaatccggttggggagtcggagaattccatttgaggactgaacttcgaaaaaagtctgaggacatcttcagctgttgtaatccgaacattgtacgagtgttgatcgtcggtgtttccgttggtccctaaaaatgcatcgctatgggagtcgtaccatgcccgttcctggggatctgctagtacttcgtatgcagattggatttcggcgaacagcttagtagcctcgtcaacattcccgtaatttcgatctgggtgcaatataagagctttttttcgatatgcctttttgatcctaagagttcgttttagttatgtccgtaaccacatatccacatatccatatgaacttactcctcatctgttgcaccgcgtataacaccaagtagctcataatagtcggtcttctgctctgtctgttctgaagcgccagagctcgcctggctagtggaatgaaattggcccatggcgttcaaggatgaataccgcaataatcaccggttgtttttaaaggaacttagtaattcattccaagtaccccaagcaaatcattgggagcatagagcgagagtactgtctcaagtgtccataagcagaggaaaggaagaaaaaaaaaacattgcgatggaattcaagggcttggcgccttcgataacgaaagcggggagaaacattttctcaatgacttttgtattttcctgttctcctgttctcctgttcccctacatgatcccctgagtttctgatctacctttttaatttgcttctttaccttcaactaccgaggaatgtaaaccggttgttcttccgttttgattgccctctccgttggtcttctccaatatcgtcaatattcctccagggatggttcggtctttaagccatcttccagacgagatcctgaattcgattctacgttattcttctcctcagtcttgcgccgccgtcgaacaaaccaacagtcgatttaaaaacgtaacgaatgagcctttactatggcgtcaccattgccagtcgcattacaaattctgggatgggcgacatgatatgccccggaaacttgctcgcccagtgaattcaaccgattggaaggccctttttgtcttcaagtatcaggttgaccgatctgtcactcggcttcttgatagtattcttggtagccagatcggccggatcgagaagtttcgccgtgttatcaatatgggatacgatacaaaagatactcttctacgatatagcttgatagattctggagaggattatctggccagaaggtgggctactaattctatgcgagttggcatgtgtttccctcaagttgaccagtgccttgtgccaattacaaaaggtactatgcccacgcgctcttgacttgcctacaccgaaacattgcgataccagagtgggcgaaactcaaacgcggagaacccgtgtcactcgaccgagccttggcttgctttgatctctttatacccgaaagtggaactggggatttggatgaagtaggtgttatttcaagtcaaccccctcgacagatctatgcctaactctgatctagatacgagactctctggatgagatcctcggccgctttgtcgcatctcacccggatctttacctctccactcctcgtgagaaggcactggccgtagcatcctggctaacgctgaataatctcacggggatcgatccagagcgggaatatcattctttagagcataactttttaggactggctctaaagcatctagggcataactctctgccgttggtgtcagctgcgatatactgctttgttgcgcagggcgtgggcctgaacgcccatccctgtggatttccgttccatgtgcatgtgatcattacccctcagccgggctcagatatcaatggcaacgctttgagtggggtggggccagggaagcccctttacttggacccgtttcggggtgctagagagactgatgtctcaaatttgcgcagccagttaacatttttgggcatgtccaacacggaccagatcgcaactctgggtgaagcatccacttctggcgttatcttacgctgtggtaagaacatattgaactcgattcgtgtcgaaccccaaaattcgacctcgcgtgccacctccatagatgttgtgagcgcaaagtacgcagcactatggtctgtgatgctactgtcggacgattcgaggccgatggatctacgccatcagttgccatggctcatggaactgttcgctacggactttccttctgatatatttctagtcgagcagtacatcacacctttgtttcgtggcctgttcgagtatgagcatatactgaagagtcttcatgtgatgagggccatggatgaggtcccaaagaagattcggagacgaaccggtggtaatgcaaatatacaatacaaggtgggccagattttccgccatcgtcgctatcattatgaggctattatcacaggctgggactcggaatgtggcgcggacgaacagtggatgacgagaatgggcattgatcgattagaagctggcaggcatcaaagcttctatcatgtgctgtgtgtggttttgtacttgtatcctcttcttggctaatggctaattatggatatctagtgtggcggatcgaagtgcccggtacgtggctgaggaaaatattggcataattcggcctcgcttcacggaattgcctggaagcttgactgccattgcgggtaagcatttcaaacggtgggatgagcgggagaggatgtttgtgagcaacatgaaggatgaataccccgatgactagttcaaatcaaccccgctttatcgggctgctagctcggatagactcgtaaaaagcctagacttatggtaggctatataacgtattcggtaagcgagctgagcaccctaaccaaaacgcgtccatgaattagcacctagtcaattcaactacctaccgtgccactaaagtctaatacgcccccgatcgtctataaagtcaatagagcagtaggatcttattagctattgaggctttttaaaaataatttgttggagtgtggcagaactaggtaggcacaatgatttgtaatgcactctcgagcggtcaaatacgtagtgtttaaacagataaacagctaggcggtcaagtatcaggtcaaagatgagatcaaagtatatattctagaataaaatagtcaatttgtctaactagcctttttttaatacaatttagggctttattataacagttaaatatttgcagatagcttagtagtttaaagattagatgaattataacttcttctctagataaatcataacttttattatgattagtacttataggactcgtactttcctatttaggattatattattattcgttccttcctatttaaaggaacttatttatatagatagttataccttccttctaggggaagtaaggatagggctttatattgaacgaaagagaggctgtttacaatggtacgaacagtatatatactggaccaaaggggaaaatgagtgtatattataggaggagtgttctcctccaaggttatcctgctatatacttatataatcgcggcaagtggctactgactactaaatataataagaaatgtaaagaatgtacggaagtacgccatttctggtcgacactttatccctaaagggatatattgaacgaaggagaggctatttaacaatggtatatatagtatatatactagactaaagggataaaaataagtgtatattataggagaagcgttctcctctaaggttatcctactaggtgcttatataatcgcggtaagtggctattaactactaaatataataagaaatataaagaatatatagaagtatactatttctagtcgatatactctcctagaagctaccttatagctcctaatataattctactgctaagctatttatctatttataagatcccgaatatctactagtcctaaggattaggtaaacctcttataagtttatatagggagtagcttaataagcctatctactagtatattagctatagctacctactaaattaagatatagctagtattaacttcttagtatagctaatagttatagatatcgatatagtaaagctttatttataattatagttatttataagtaagtaaattaattatctatttattattataattaatagtaaggttagtctagtagttaaggttaactatataaagtaacctttcctactatattactaactttctaactttagagatagtaagtagtttagctttagtagttaatattattattatatattacttactagccttctaattaattactatactaaatagtttatataggaaaccttctaagcttttttaattagtataattactaaaggaagtattactagagaagtaaagtactaattaattatataaagggtagtacttaagagctagatattatatattatatagatattagattaagtaattaactactttataatacttagatcttagattaattaggaatttagctagataattagctacctttactatattaaggtaagtaataactataggataaaaggctaagttaagcttttattagtacttatagatctattcctttattataatccttacttaagatataatagctcccttaatctagtagtaatcttagggaaatactaaactccctaagaatcagccttaactagggaataaaataggaattacttctctaactactagaactaaataaatagaatcctagatttaagaaaatctaattaatcttcctaaagtaactatagaaactacctaatttatctaagaataaatctaggtctttaaagctaaagtagtactttaaaagagacttattactactaaagaacttattaaagtaaatagaagaaagcttaagagttactaaaaaggaaaggagttaaactaacctaagaataaaagtaatttaatattagagagtaaatatagttagaagggtaagattaaaagagatattataatatttaaaaagaaatatagtattaaaaatagagaaaactagctaaataaccttaataccctttttgannnnnnnnnnnnnnnnnnnnnnnnnnnnnnnnnnnnnnnnnnnnnnnnnnnnnnnnnnnnnnnnnnnnnnnnnnnnnnnnnnnnnnnnnnnnnnnnnnnnnnnnnnnnnnnnnnnnnnnnnnnnnnnnnnnnnnnnnnnnnnnnnnnnnnnnnnnnnnnnnnnnnnnnnnnnnnnnnnnnnnnnnnnnnnnnnnnnnnnnnnnnnnnnnnnnnnnnnnnnnnnnnnnnnnnnnnnnnnnnnnnnnnnnnnnnnnnnnnnnnnnnnnnnnnnnnnnnnnnnnnnnnnnnnnnnnnnnnnnnnnnnnnnnnnnnnnnnnnnnnnnnnnnnnnnnnnnnnnnnnnnnnnnnnnnnnnnnnnnnnnnnnnnnnnnnnnnnnnnnnnnnnnnnnnnnnnnnnnnnnnnnnnnnnnnnnnnnnnnnnnnnnnnnnnnnnnnnnnnnnnnnnnnnnnnnnnnnnnnnnnnnnnnnnnnnnnnnnnnnnnnnnnnnnnnnnnnnnnnnnnnnnnnnnnnnnnnnnnnnnnnnnnnnnnnnnnnnnnnnnnnnnnnnnnnnnnnnnnnnnnnnnnnnnnnnnnnnnnnnnnnnnnnnnnnnnnnnnnnnnnnnnnnnnnnnnnnnnnnnnnnnnnnnnnnnnnnnnnnnnnnnnnnnnnnnnnnnnnnnnnnnnnnnnnnnnnnnnnnnnnnnnnnnnnnnnnnnnnnnnnnnnnnnnnnnnnnnnnnnnnnnnnnnnnnnnnnnnnnnnnnnnnnnnnnnnnnnnnnnnnnnnnnnnnnnnnnnnnnnnnnnnnnnnnnnnnnnnnnnnnnnnnnnnnnnnnnnnnnnnnnnnnnnnnnnnnnnnnnnnnnnnnnnnnnnnnnnnnnnnnnnnnnnnnnnnnnnnnnnnnnnnnnnnnnnnnnnnnnnnnnnnnnnnnnnnnnnnnnnnnnnnnnnnnnnnnnnnnnnnnnnnnnnnnnnnnnnnnnnnnnnnnnnnnnnnnnnnnnnnnnnnnnnnnnnnnnnnnnnnnnnnnnnnnnnnnnnnnnnnnnnnnnnnnnnnnnnnnnnnnnnnnnnnnnnnnnnnnnnnnnnnnnnnnnnnnnnnnnnnnnnnnnnnnnnnnnnnnnnnnnnnnnnnnnnnnnnnnnnnnnnnnnnnnnnnnnnnnnnnnnnnnnnnnnnnnnnnnnnnnnnnnnnnnnnnnnnnnnnnnnnnnnnnnnnnnnnnnnnnnnnnnnnnnnnnnnnnnnnnnnnnnnnnnnnnnnnnnnnnnnnnnnnnnnnnnnnnnnnnnnnnnnnnnnnnnnnnnnnnnnnnnnnnnnnnnnnnnnnnnnnnnnnnnnnnnnnnnnnnnnnnnnnnnnnnnnnnnnnnnnnnnnnnnnnnnnnnnnnnnnnnnnnnnnnnnnnnnnnnnnnnnnnnnnnnnnnnnnnnnnnnnnnnnnnnnnnnnnnnnnnnnnnnnnnnnnnnnnnnnnnnnnnnnnnnnnnnnnnnnnnnnnnnnnnnnnnnnnnnnnnnnnnnnnnnnnnnnnnnnnnnnnnnnnnnnnnnnnnnnnnnnnnnnnnnnnnnnnnnnnnnnnnnnnnnnnnnnnnnnnnnnnnnnnnnnnnnnnnnnnnnnnnnnnnnnnnnnnnnnnnnnnnnnnnnnnnnnnnnnnnnnnnnnnnnnnnnnnnnnnnnnnnnnnnnnnnnnnnnnnnnnnnnnnnnnnnnnnnnnnnnnnnnnnnnnnnnnnnnnnnnnnnnnnnnnnnnnnnnnnnnnnnnnnnnnnnnnnnnnnnnnnnnnnnnnnnnnnnnnnnnnnnnnnnnnnnnnnnnnnnnnnnnnnnnnnnnnnnnnnnnnnnnnnnnnnnnnnnnnnnnnnnnnnnnnnnnnnnnnnnnnnnnnnnnnnnnnnnnnnnnnnnnnnnnnnnnnnnnnnnnnnnnnnnnnnnnnnnnnnnnnnnnnnnnnnnnnnnnnnnnnnnnnnnnnnnnnnnnnnnnnnnnnnnnnnnnnnnnnnnnnnnnnnnnnnnnnnnnnnnnnnnnnnnnnnnnnnnnnnnnnnnnnnnnnnnnnnnnnnnnnnnnnnnnnnnnnnnnnnnnnnnnnnnnnnnnnnnnnnnnnnnnnnnnnnnnnnnnnnnnnnnnnnnnnnnnnnnnnnnnnnnnnnnnnnnnnnnnnnnnnnnnnnnnnnnnnnnnnnnnnnnnnnnnnnnnnnnnnnnnnnnnnnnnnnnnnnnnnnnnnnnnnnnnnnnnnnnnnnnnnnnnnnnnnnnnnnnnnnnnnnnnnnnnnnnnnnnnnnnnnnnnnnnnnnnnnnnnnnnnnnnnnnnnnnnnnnnnnnnnnnnnnnnnnnnnnnnnnnnnnnnnnnnnnnnnnnnnnnnnnnnnnnnnnnnnnnnnnnnnnnnnnnnnnnnnnnnnnnnnnnnnnnnnnnnnnnnnnnnnnnnnnnnnnnnnnnnnnnnnnnnnnnnnnnnnnnnnnnnnnnnnnnnnnnnnnnnnnnnnnnnnnnnnnnnnnnnnnnnnnnnnnnnnnnnnnnnnnnnnnnnnnnnnnnnnnnnnnnnnnnnnnnnnnnnnnnnnnnnnnnnnnnnnnnnnnnnnnnnnnnnnnnnnnnnnnnnnnnnnnnnnnnnnnnnnnnnnnnnnnnnnnnnnnnnnnnnnnnnnnnnnnnnnnnnnnnnnnnnnnnnnnnnnnnnnnnnnnnnnnnnnnnnnnnnnnnnnnnnnnnnnnnnnnnnnnnnnnnnnnnnnnnnnnnnnnnnnnnnnnnnnnnnnnnnnnnnnnnnnnnnnnnnnnnnnnnnnnnnnnnnnnnnnnnnnnnnnnnnnnnnnnnnnnnnnnnnnnnnnnnnnnnnnnnnnnnnnnnnnnnnnnnnnnnnnnnnnnnnnnnnnnnnnnnnnnnnnnnnnnnnnnnnnnnnnnnnnnnnnnnnnnnnnnnnnnnnnnnnnnnnnnnnnnnnnnnnnnnnnnnnnnnnnnnnnnnnnnnnnnnnnnnnnnnnnnnnnnnnnnnnnnnnnnnnnnnnnnnnnnnnnnnnnnnnnnnnnnnnnnnnnnnnnnnnnnnnnnnnnnnnnnnnnnnnnnnnnnnnnnnnnnnnnnnnnnnnnnnnnnnnnnnnnnnnnnnnnnnnnnnnnnnnnnnnnnnnnnnnnnnnnnnnnnnnnnnnnnnnnnnnnnnnnnnnnnnnnnnnnnnnnnnnnnnnnnnnnnnnnnnnnnnnnnnnnnnnnnnnnnnnnnnnnnnnnnnnnnnnnnnnnnnnnnnnnnnnnnnnnnnnnnnnnnnnnnnnnnnnnnnnnnnnnnnnnnnnnnnnnnnnnnnnnnnnnnnnnnnnnnnnnnnnnnnnnnnnnnnnnnnnnnnnnnnnnnnnnnnnnnnnnnnnnnnnnnnnnnnnnnnnnnnnnnnnnnnnnnnnnnnnnnnnnnnnnnnnnnnnnnnnnnnnnnnnnnnnnnnnnnnnnnnnnnnnnnnnnnnnnnnnnnnnnnnnnnnnnnnnnnnnnnnnnnnnnnnnnnnnnnnnnnnnnnnnnnnnnnnnnnnnnnnnnnnnnnnnnnnnnnnnnnnnnnnnnnnnnnnnnnnnnnnnnnnnnnnnnnnnnnnnnnnnnnnnnnnnnnnnnnnnnnnnnnnnnnnnnnnnnnnnnnnnnnnnnnnnnnnnnnnnnnnnnnnnnnnnnnnnnnnnnnnnnnnnnnnnnnnnnnnnnnnnnnnnnnnnnnnnnnnnnnnnnnnnnnnnnnnnnnnnnnnnnnnnnnnnnnnnnnnnnnnnnnnnnnnnnnnnnnnnnnnnnnnnnnnnnnnnnnnnnnnnnnnnnnnnnnnnnnnnnnnnnnnnnnnnnnnnnnnnnnnnnnnnnnnnnnnnnnnnnnnnnnnnnnnnnnnnnnnnnnnnnnnnnnnnnnnnnnnnnnnnnnnnnnnnnnnnnnnnnnnnnnnnnnnnnnnnnnnnnnnnnnnnnnnnnnnnnnnnnnnnnnnnnnnnnnnnnnnnnnnnnnnnnnnnnnnnnnnnnnnnnnnnnnnnnnnnnnnnnnnnnnnnnnnnnnnnnnnnnnnnnnnnnnnnnnnnnnnnnnnnnnnnnnnnnnnnnnnnnnnnnnnnnnnnnnnnnnnnnnnnnnnnnnnnnnnnnnnnnnnnnnnnnnnnnnnnnnnnnnnnnnnnnnnnnnnnnnnnnnnnnnnnnnnnnnnnnnnnnnnnnnnnnnnnnnnnnnnnnnnnnnnnnnnnnnnnnnnnnnnnnnnnnnnnnnnnnnnnnnnnnnnnnnnnnnnnnnnnnnnnnnnnnnnnnnnnnnnnnnnnnnnnnnnnnnnnnnnnnnnnnnnnnnnnnnnnnnnnnnnnnnnnnnnnnnnnnnnnnnnnnnnnnnnnnnnnnnnnnnnnnnnnnnnnnnnnnnnnnnnnnnnnnnnnnnnnnnnnnnnnnnnnnnnnnnnnnnnnnnnnnnnnnnnnnnnnnnnnnnnnnnnnnnnnnnnnnnnnnnnnnnnnnnnnnnnnnnnnnnnnnnnnnnnnnnnnnnnnnnnnnnnnnnnnnnnnnnnnnnnnnnnnnnnnnnnnnnnnnnnnnnnnnnnnnnnnnnnnnnnnnnnnnnnnnnnnnnnnnnnnnnnnnnnnnnnnnnnnnnnnnnnnnnnnnnnnnnnnnnnnnnnnnnnnnnnnnnnnnnnnnnnnnnnnnnnnnnnnnnnnnnnnnnnnnnnnnnnnnnnnnnnnnnnnnnnnnnnnnnnnnnnnnnnnnnnnnnnnnnnnnnnnnnnnnnnnnnnnnnnnnnnnnnnnnnnnnnnnnnnnnnnnnnnnnnnnnnnnnnnnnnnnnnnnnnttaatagattagactatttagaattttagaatatattagaaagtaggtatactacctcctattcctagataaatatactataatttataatattttccctatctctttcctctaactataagaataaagagaagggaaactaaaataactactattattagaattagtagataataataaataggaggttaaagagtttaaagataactatatttttaaagataaattatattatctagttaaatagtaggactagccttctaaatataactaataggtcctagagaatataataattaatatactgaaacttattataaaatataaaaaggtataaaagatataaaagaaattaacctaagtaatatctatactaggttactattaaattattataactataatatctaattactataaggaaagatagttatatacttcttaagtattacctctatatctagattattaagtaattctactatcttagagtaaatttattagaataaaattatagtatctatctaagtaataagtaattcctctaaatttataagttaggattactctaaggcctatactataaagatatcttagggataaatagtagtataagtatcttagttacctataggatacttaataataaaggctatatagttattataaatagattaaaaagaaatattaataaaactattataaggaagattagatttatcttaatacttatagtaggaatatatatcctacttaaattatagtttttataatatattcttataagggtattaaaagctataattagattataaactatatctataactactttaataaacttagaagggaaaaggaactatacttctttattatccttatctaatatacctatagctactctaagggtccttctaattattaactaaaattactctatctaagaaagaactactagtaactagaaacaatttcccttannnnnnnnnnnnnnnnnnnnnnnnnnnnnnnnnnnnnnnnnnnnnnnnnnnnnnnnnnnnnnnnnnnnnnnnnnnnnnnnnnnnnnnnnnnnnnnnnnnnnnnnnnnnnnnnnnnnnnnnnnnnnnnnnnnnnnnnnnnnnnnnnnnnnnnnnnnnnnnnnnnnnnnnnnnnnnnnnnnnnnnnnnnnnnnnnnnnnnnnnnnnnnnnnnnnnnnnnnnnnnnnnnnnnnnnnnnnnnnnnnnnnnnnnnnnnnnnnnnnnnnnnnnnnnnnnnnnnnnnnnnnnnnnnnnnnnnnnnnnnnnnnnnnnnnnnnnnnnnnnnnnnnnnnnnnnnnnnnnnnnnnnnnnnnnnnnnnnnnnnnnnnnnnnnnnnnnnnnnnnnnnnnnnnnnnnnnnnnnnnnnnnnnnnnnnnnnnnnnnnnnnnnnnnnnnnnnnnnnnnnnnnnnnnnnnnnnnnnnnnnnnnnnnnnnnnnnnnnnnnnnnnnnnnnnnnnnnnnnnnnnnnnnnnnnnnnnnnnnnnnnnnnnnnnnnnnnnnnnnnnnnnnnnnnnnnnnnnnnnnnnnnnnnnnnnnnnnnnnnnnnnnnnnnnnnnnnnnnnnnnnnnnnnnnnnnnnnnnnnnnnnnnnnnnnnnnnnnnnnnnnnnnnnnnnnnnnnnnnnnnnnnnnnnnnnnnnnnnnnnnnnnnnnnnnnnnnnnnnnnnnnnnnnnnnnnnnnnnnnnnnnnnnnnnnnnnnnnnnnnnnnnnnnnnnnnnnnnnnnnnnnnnnnnnnnnnnnnnnnnnnnnnnnnnnnnnnnnnnnnnnnnnnnnnnnnnnnnnnnnnnnnnnnnnnnnnnnnnnnnnnnnnnnnnnnnnnnnnnnnnnnnnnnnnnnnnnnnnnnnnnnnnnnnnnnnnnnnnnnnnnnnnnnnnnnnnnnnnnnnnnnnnnnnnnnnnnnnnnnnnnnnnnnnnnnnnnnnnnnnnnnnnnnnnnnnnnnnnnnnnnnnnnnnnnnnnnnnnnnnnnnnnnnnnnnnnnnnnnnnnnnnnnnnnnnnnnnnnnnnnnnnnnnnnnnnnnnnnnnnnnnnnnnnnnnnnnnnnnnnnnnnnnnnnnnnnnnnnnnnnnnnnnnnnnnnnnnnnnnnnnnnnnnnnnnnnnnnnnnnnnnnnnnnnnnnnnnnnnnnnnnnnnnnnnnnnnnnnnnnnnnnnnnnnnnnnnnnnnnnnnnnnnnnnnnnnnnnnnnnnnnnnnnnnnnnnnnnnnnnnnnnnnnnnnnnnnnnnnnnnnnnnnnnnnnnnnnnnnnnnnnnnnnnnnnnnnnnnnnnnnnnnnnnnnnnnnnnnnnnnnnnnnnnnnnnnnnnnnnnnnnnnnnnnnnnnnnnnnnnnnnnnnnnnnnnnnnnnnnnnnnnnnnnnnnnnnnnnnnnnnnnnnnnnnnnnnnnnnnnnnnnnnnnnnnnnnnnnnnnnnnnnnnnnnnnnnnnnnnnnnnnnnnnnnnnnnnnnnnnnnnnnnnnnnnnnnnnnnnnnnnnnnnnnnnnnnnnnnnnnnnnnnnnnnnnnnnnnnnnnnnnnnnnnnnnnnnnnnnnnnnnnnnnnnnnnnnnnnnnnnnnnnnnnnnnnnnnnnnnnnnnnnnnnnnnnnnnnnnnnnnnnnnnnnnnnnnnnnnnnnnnnnnnnnnnnnnnnnnnnnnnnnnnnnnnnnnnnnnnnnnnnnnnnnnnnnnnnnnnnnnnnnnnnnnnnnnnnnnnnnnnnnnnnnnnnnnnnnnnnnnnnnnnnnnnnnnnnnnnnnnnnnnnnnnnnnnnnnnnnnnnnnnnnnnnnnnnnnnnnnnnnnnnnnnnnnnnnnnnnnnnnnnnnnnnnnnnnnnnnnnnnnnnnnnnnnnnnnnnnnnnnnnnnnnnnnnnnnnnnnnnnnnnnnnnnnnnnnnnnnnnnnnnnnnnnnnnnnnnnnnnnnnnnnnnnnnnnnnnnnnnnnnnnnnnnnnnnnnnnnnnnnnnnnnnnnnnnnnnnnnnnnnnnnnnnnnnnnnnnnnnnnnnnnnnnnnnnnnnnnnnnnnnnnnnnnnnnnnnnnnnnnnnnnnnnnnnnnnnnnnnnnnnnnnnnnnnnnnnnnnnnnnnnnnnnnnnnnnnnnnnnnnnnnnnnnnnnnnnnnnnnnnnnnnnnnnnnnnnnnnnnnnnnnnnnnnnnnnnnnnnnnnnnnnnnnnnnnnnnnnnnnnnnnnnnnnnnnnnnnnnnnnnnnnnnnnnnnnnnnnnnnnnnnnnnnnnnnnnnnnnnnnnnnnnnnnnnnnnnnnnnnnnnnnnnnnnnnnnnnnnnnnnnnnnnnnnnnnnnnnnnnnnnnnnnnnnnnnnnnnnnnnnnnnnnnnnnnnnnnnnnnnnnnnnnnnnnnnnnnnnnnnnnnnnnnnnnnnnnnnnnnnnnnnnnnnnnnnnnnnnnnnnnnnnnnnnnnnnnnnnnnnnnnnnnnnnnnnnnnnnnnnnnnnnnnnnnnnnnnnnnnnnnnnnnnnnnnnnnnnnnnnnnnnnnnnnnnnnnnnnnnnnnnnnnnnnnnnnnnnnnnnnnnnnnnnnnnnnnnnnnnnnnnnnnnnnnnnnnnnnnnnnnnnnnnnnnnnnnnnnnnnnnnnnnnnnnnnnnnnnnnnnnnnnnnnnnnnnnnnnnnnnnnnnnnnnnnnnnnnnnnnnnnnnnnnnnnnnnnnnnnnnnnnnnnnnnnnnnnnnnnnnnnnnnnnnnnnnnnnnnnnnnnnnnnnnnnnnnnnnnnnnnnnnnnnnnnnnnnnnnnnnnnnnnnnnnnnnnnnnnnnnnnnnnnnnnnnnnnnnnnnnnnnnnnnnnnnnnnnnnnnnnnnnnnnnnnnnnnnnnnnnnnnnnnnnnnnnnnnnnnnnnnnnnnnnnnnnnnnnnnnnnnnnnnnnnnnnnnnnnnnnnnnnnnnnnnnnnnnnnnnnnnnnnnnnnnnnnnnnnnnnnnnnnnnnnnnnnnnnnnnnnnnnnnnnnnnnnnnnnnnnnnnnnnnnnnnnnnnnnnnnnnnnnnnnnnnnnnnnnnnnnnnnnnnnnnnnnnnnnnnnnnnnnnnnnnnnnnnnnnnnnnnnnnnnnnnnnnnnnnnnnnnnnnnnnnnnnnnnnnnnnnnnnnnnnnnnnnnnnnnnnnnnnnnnnnnnnnnnnnnnnnnnnnnnnnnnnnnnnnnnnnnnnnnnnnnnnnnnnnnnnnnnnnnnnnnnnnnnnnnnnnnnnnnnnnnnnnnnnnnnnnnnnnnnnnnnnnnnnnnnnnnnnnnnnnnnnnnnnnnnnnnnnnnnnnnnnnnnnnnnnnnnnnnnnnnnnnnnnnnnnnnnnnnnnnnnnnnnnnnnnnnnnnnnnnnnnnnnnnnnnnnnnnnnnnnnnnnnnnnnnnnnnnnnnnnnnnnnnnnnnnnnnnnnnnnnnnnnnnnnnnnnnnnnnnnnnnnnnnnnnnnnnnnnnnnnnnnnnnnnnnnnnnnnnnnnnnnnnnnnnnnnnnnnnnnnnnnnnnnnnnnnnnnnnnnnnnnnnnnnnnnnnnnnnnnnnnnnnnnnnnnnnnnnnnnnnnnnnnnnnnnnnnnnnnnnnnnnnnnnnnnnnnnnnnnnnnnnnnnnnnnnnnnnnnnnnnnnnnnnnnnnnnnnnnnnnnnnnnnnnnnnnnnnnnnnnnnnnnnnnnnnnnnnnnnnnnnnnnnnnnnnnnnnnnnnnnnnnnnnnnnnnnnnnnnnnnnnnnnnnnnnnnnnnnnnnnnnnnnnnnnnnnnnnnnnnnnnnnnnnnnnnnnnnnnnnnnnnnnnnnnnnnnnnnnnnnnnnnnnnnnnnnnnnnnnnnnnnnnnnnnnnnnnnnnnnnnnnnnnnnnnnnnnnnnnnnnnnnnnnnnnnnnnnnnnnnnnnnnnnnnnnnnnnnnnnnnnnnnnnnnnnnnnnnnnnnnnnnnnnnnnnnnnnnnnnnnnnnnnnnnnnnnnnnnnnnnnnnnnnnnnnnnnnnnnnnnnnnnnnnnnnnnnnnnnnnnnnnnnnnnnnnnnnnnnnnnnnnnnnnnnnnnnnnnnnnnnnnnnnnnnnnnnnnnnnnnnnnnnnnnnnnnnnnnnnnnnnnnnnnnnnnnnnnnnnnnnnnnnnnnnnnnnnnnnnnnnnnnnnnnnnnnnnnnnnnnnnnnnnnnnnnnnnnnnnnnnnnnnnnnnnnnnnnnnnnnnnnnnnnnnnnnnnnnnnnnnnnnnnnnnnnnnnnnnnnnnnnnnnnnnnnnnnnnnnnnnnnnnnnnnnnnnnnnnnnnnnnnnnnnnnnnnnnnnnnnnnnnnnnnnnnnnnnnnnnnnnnnnnnnnnnnnnnnnnnnnnnnnnnnnnnnnnnnnnnnnnnnnnnnnnnnnnnnnnnnnnnnnnnnnnnnnnnnnnnnnnnnnnnnnnnnnnnnnnnnnnnnnnnnnnnnnnnnnnnnnnnnnnnnnnnnnnnnnnnnnnnnnnnnnnnnnnnnnnnnnnnnnnnnnnnnnnnnnnnnnnnnnnnnnnnnnnnnnnnnnnnnnnnnnnnnnnnnnnnnnnnnnnnnnnnnnnnnnnnnnnnnnnnnnnnnnnnnnnnnnnnnnnnnnnnnnnnnnnnnnnnnnnnnnnnnnnnnnnnnnnnnnnnnnnnnnnnnnnnnnnnnnnnnnnnnnnnnnnnnnnnnnnnnnnnnnnnnnnnnnnnnnnnnnnnnnnnnnnnnnnnnnnnnnnnnnnnnnnnnnnnnnnnnnnnnnnnnnnnnnnnnnnnnnnnnnnnnnnnnnnnnnnnnnnnnnnnnnnnnnnnnnnnnnnnnnnnnnnnnnnnnnnnnnnnnnnnnnnnnnnnnnnnnnnnnnnnnnnnnnnnnnnnnnnnnnnnnnnnnnnnnnnnnnnnnnnnnnnnnnnnnnnnnnnnnnnnnnnnnnnnnnnnnnnnnnnnnnnnnnnnnnnnnnnnnnnnnnnnnnnnnnnnnnnnnnnnnnnnnnnnnnnnnnnnnnnnnnnnnnnnnnnnnnnnnnnnnnnnnnnnnnnnnnnnnnnnnnnnnnnnnnnnnnnnnnnnnnnnnnnnnnnnnnnnnnnnnnnnnnnnnnnnnnnnnnnnnnnnnnnnnnnnnnnnnnnnnnnnnnnnnnnnnnnnnnnnnnnnnnnnnnnnnnnnnnnnnnnnnnnnnnnnnnnnnnnnnnnnnnnnnnnnnnnnnnnnnnnnnnnnnnnnnnnnnnnnnnnnnnnnnnnnnnnnnnnnnnnnnnnnnnnnnnnnnnnnnnnnnnnnnnnnnnnnnnnnnnnnnnnnnnnnnnnnnnnnnnnnnnnnnnnnnnnnnnnnnnnnnnnnnnnnnnnnnnnnnnnnnnnnnnnnnnnnnnnnnnnnnnnnnnnnnnnnnnnnnnnnnnnnnnnnnnnnnnnnnnnnnnnnnnnnnnnnnnnnnnnnnnnnnnnnnnnnnnnnnnnnnnnnnnnnnnnnnnnnnnnnnnnnnnnnnnnnnnnnnnnnnnnnnnnnnnnnnnnnnnnnnnnnnnnnnnnnnnnnnnnnnnnnnnnnnnnnnnnnnnnnnnnnnnnnnnnnnnnnnnnnnnnnnnnnnnnnnnnnnnnnnnnnnnnnnnnnnnnnnnnnnnnnnnnnnnnnnnnnnnnnnnnnnnnnnnnnnnnnnnnnnnnnnnnnnnnnnnnnnnnnnnnnnnnnnnnnnnnnnnnnnnnnnnnnnnnnnnnnnnnnnnnnnnnnnnnnnnnnnnnnnnnnnnnnnnnnnnnnnnnnnnnnnnnnnnnnnnnnnnnnnnnnnnnnnnnnnnnnnnnnnnnnnnnnnnnnnnnnnnnnnnnnnnnnnnnnnnnnnnnnnnnnnnnnnnnnnnnnnnnnnnnnnnnnnnnnnnnnnnnnnnnnnnnnnnnnnnnnnnnnnnnnnnnnnnnnnnnnnnnnnnnnnnnnnnnnnnnnnnnnnnnnnnnnnnnnnnnnnnnnnnnnnnnnnnnnnnnnnnnnnnnnnnnnnnnnnnnnnnnnnnnnnnnnnnnnnnnnnnnnnnnnnnnnnnnnnnnnnnnnnnnnnnnnnnnnnnnnnnnnnnnnnnnnnnnnnnnnnnnnnnnnnnnnnnnnnnnnnnnnnnnnnnnnnnnnnnnnnnnnnnnnnnnnnnnnnnnnnnnnnnnnnnnnnnnnnnnnnnnnnnnnnnnnnnnnnnnnnnnnnnnnnnnnnnnnnnnnnnnnnnnnnnnnnnnnnnnnnnnnnnnnnnnnnnnnnnnnnnnnnnnnnnnnnnnnnnnnnnnnnnnnnnnnnnnnnnnnnnnnnnnnnnnnnnnnnnnnnnnnnnnnnnnnnnnnnnnnnnnnnnnnnnnnnnnnnnnnnnnnnnnnnnnnnnnnnnnnnnnnnnnnnnnnnnnnnnnnnnnnnnnnnnnnnnnnnnnnnnnnnnnnnnnnnnnnnnnnnnnnnnnnnnnnnnnnnnnnnnnnnnnnnnnnnnnnnnnnnnnnnnnnnnnnnnnnnnnnnnnnnnnnnnnnnnnnnnnnnnnnnnnnnnnnnnnnnnnnnnnnnnnnnnnnnnnnnnnnnnnnnnnnnnnnnnnnnnnnnnnnnnnnnnnnnnnnnnnnnnnnnnnnnnnnnnnnnnnnnnnnnnnnnnnnnnnnnnnnnnnnnnnnnnnnnnnnnnnnnnnnnnnnnnnnnnnnnnnnnnnnnnnnnnnnnnnnnnnnnnnnnnnnnnnnnnnnnnnnnnnnnnnnnnnnnnnnnnnnnnnnnnnnnnnnnnnnnnnnnnnnnnnnnnnnnnnnnnnnnnnnnnnnnnnnnnnnnnnnnnnnnnnnnnnnnnnnnnnnnnnnnnnnnnnnnnnnnnnnnnnnnnnnnnnnnnnnnnnnnnnnnnnnnnnnnnnnnnnnnnnnnnnnnnnnnnnnnnnnnnnnnnnnnnnnnnnnnnnnnnnnnnnnnnnnnnnnnnnnnnnnnnnnnnnnnnnnnnnnnnnnnnnnnnnnnnnnnnnnnnnnnnnnnnnnnnnnnnnnnnnnnnnnnnnnnnnnnnnnnnnnnnnnnnnnnnnnnnnnnnnnnnnnnnnnnnnnnnnnnnnnnnnnnnnnnnnnnnnnnnnnnnnnnnnnnnnnnnnnnnnnnnnnnnnnnnnnnnnnnnnnnnnnnnnnnnnnnnnnnnnnnnnnnnnnnnnnnnnnnnnnnnnnnnnnnnnnnnnnnnnnnnnnnnnnnnnnnnnnnnnnnnnnnnnnnnnnnnnnnnnnnnnnnnnnnnnnnnnnnnnnnnnnnnnnnnnnnnnnnnnnnnnnnnnnnnnnnnnnnnnnnnnnnnnnnnnnnnnnnnnnnnnnnnnnnnnnnnnnnnnnnnnnnnnnnnnnnnnnnnnnnnnnnnnnnnnnnnnnnnnnnnnnnnnnnnnnnnnnnnnnnnnnnnnnnnnnnnnnnnnnnnnnnnnnnnnnnnnnnnnnnnnnnnnnnnnnnnnnnnnnnnnnnnnnnnnnnnnnnnnnnnnnnnnnnnnnnnnnnnnnnnnnnnnnnnnnnnnnnnnnnnnnnnnnnnnnnnnnnnnnnnnnnnnnnnnnnnnnnnnnnnnnnnnnnnnnnnnnnnnnnnnnnnnnnnnnnnnnnnnnnnnnnnnnnnnnnnnnnnnnnnnnnnnnnnnnnnnnnnnnnnnnnnnnnnnnnnnnnnnnnnnnnnnnnnnnnnnnnnnnnnnnnnnnnnnnnnnnnnnnnnnnnnnnnnnnnnnnnnnnnnnnnnnnnnnnnnnnnnnnnnnnnnnnnnnnnnnnnnnnnnnnnnnnnnnnnnnnnnnnnnnnnnnnnnnnnnnnnnnnnnnnnnnnnnnnnnnnnnnnnnnnnnnnnnnnnnnnnnnnnnnnnnnnnnnnnnnnnnnnnnnnnnnnnnnnnnnnnnnnnnnnnnnnnnnnnnnnnnnnnnnnnnnnnnnnnnnnnnnnnnnnnnnnnnnnnnnnnnnnnnnnnnnnnnnnnnnnnnnnnnnnnnnnnnnnnnnnnnnnnnnnnnnnnnnnnnnnnnnnnnnnnnnnnnnnnnnnnnnnnnnnnnnnnnnnnnnnnnnnnnnnnnnnnnnnnnnnnnnnnnnnnnnnnnnnnnnnnnnnnnnnnnnnnnnnnnnnnnnnnnnnnnnnnnnnnnnnnnnnnnnnnnnnnnnnnnnnnnnnnnnnnnnnnnnnnnnnnnnnnnnnnnnnnnnnnnnnnnnnnnnnnnnnnnnnnnnnnnnnnnnnnnnnnnnnnnnnnnnnnnnnnnnnnnnnnnnnnnnnnnnnnnnnnnnnnnnnnnnnnnnnnnnnnnnnnnnnnnnnnnnnnnnnnnnnnnnnnnnnnnnnnnnnnnnnnnnnnnnnnnnnnnnnnnnnnnnnnnnnnnnnnnnnnnnnnnnnnnnnnnnnnnnnnnnnnnnnnnnnnnnnnnnnnnnnnnnnnnnnnnnnnnnnnnnnnnnnnnnnnnnnnnnnnnnnnnnnnnnnnnnnnnnnnnnnnnnnnnnnnnnnnnnnnnnnnnnnnnnnnnnnnnnnnnnnnnnnnnnnnnnnnnnnnnnnnnnnnnnnnnnnnnnnnnnnnnnnnnnnnnnnnnnnnnnnnnnnnnnnnnnnnnnnnnnnnnnnnnnnnnnnnnnnnnnnnnnnnnnnnnnnnnnnnnnnnnnnnnnnnnnnnnnnnnnnnnnnnnnnnnnnnnnnnnnnnnnnnnnnnnnnnnnnnnnnnnnnnnnnnnnnnnnnnnnnnnnnnnnnnnnnnnnnnnnnnnnnnnnnnnnnnnnnnnnnnnnnnnnnnnnnnnnnnnnnnnnnnnnnnnnnnnnnnnnnnnnnnnnnnnnnnnnnnnnnnnnnnnnnnnnnnnnnnnnnnnnnnnnnnnnnnnnnnnnnnnnnnnnnnnnnnnnnnnnnnnnnnnnnnnnnnnnnnnnnnnnnnnnnnnnnnnnnnnnnnnnnnnnnnnnnnnnnnnnnnnnnnnnnnnnnnnnnnnnnnnnnnnnnnnnnnnnnnnnnnnnnnnnnnnnnnnnnnnnnnnnnnnnnnnnnnnnnnnnnnnnnnnnnnnnnnnnnnnnnnnnnnnnnnnnnnnnnnnnnnnnnnnnnnnnnnnnnnnnnnnnnnnnnnnnnnnnnnnnnnnnnnnnnnnnnnnnnnnnnnnnnnnnnnnnnnnnnnnnnnnnnnnnnnnnnnnnnnnnnnnnnnnnnnnnnnnnnnnnnnnnnnnnnnnnnnnnnnnnnnnnnnnnnnnnnnnnnnnnnnnnnnnnnnnnnnnnnnnnnnnnnnnnnnnnnnnnnnnnnnnnnnnnnnnnnnnnnnnnnnnnnnnnnnnnnnnnnnnnnnnnnnnnnnnnnnnnnnnnnnnnnnnnnnnnnnnnnnnnnnnnnnnnnnnnnnnnnnnnnnnnnnnnnnnnnnnnnnnnnnnnnnnnnnnnnnnnnnnnnnnnnnnnnnnnnnnnnnnnnnnnnnnnnnnnnnnnnnnnnnnnnnnnnnnnnnnnnnnnnnnnnnnnnnnnnnnnnnnnnnnnnnnnnnnnnnnnnnnnnnnnnnnnnnnnnnnnnnnnnnnnnnnnnnnnnnnnnnnnnnnnnnnnnnnnnnnnnnnnnnnnnnnnnnnnnnnnnnnnnnnnnnnnnnnnnnnnnnnnnnnnnnnnnnnnnnnnnnnnnnnnnnnnnnnnnnnnnnnnnnnnnnnnnnnnnnnnnnnnnnnnnnnnnnnnnnnnnnnnnnnnnnnnnnnnnnnnnnnnnnnnnnnnnnnnnnnnnnnnnnnnnnnnnnnnnnnnnnnnnnnnnnnnnnnnnnnnnnnnnnnnnnnnnnnnnnnnnnnnnnnnnnnnnnnnnnnnnnnnnnnnnnnnnnnnnnnnnnnnnnnnnnnnnnnnnnnnnnnnnnnnnnnnnnnnnnnnnnnnnnnnnnnnnnnnnnnnnnnnnnnnnnnnnnnnnnnnnnnnnnnnnnnnnnnnnnnnnnnnnnnnnnnnnnnnnnnnnnnnnnnnnnnnnnnnnnnnnnnnnnnnnnnnnnnnnnnnnnnnnnnnnnnnnnnnnnnnnnnnnnnnnnnnnnnnnnnnnnnnnnnnnnnnnnnnnnnnnnnnnnnnnnnnnnnnnnnnnnnnnnnnnnnnnnnnnnnnnnnnnnnnnnnnnnnnnnnnnnnnnnnnnnnnnnnnnnnnnnnnnnnnnnnnnnnnnnnnnnnnnnnnnnnnnnnnnnnnnnnnnnnnnnnnnnnnnnnnnnnnnnnnnnnnnnnnnnnnnnnnnnnnnnnnnnnnnnnnnnnnnnnnnnnnnnnnnnnnnnnnnnnnnnnnnnnnnnnnnnnnnnnnnnnnnnnnnnnnnnnnnnnnnnnnnnnnnnnnnnnnnnnnnnnnnnnnnnnnnnnnnnnnnnnnnnnnnnnnnnnnnnnnnnnnnnnnnnnnnnnnnnnnnnnnnnnnnnnnnnnnnnnnnnnnnnnnnnnnnnnnnnnnnnnnnnnnnnnnnnnnnnnnnnnnnnnnnnnnnnnnnnnnnnnnnnnnnnnnnnnnnnnnnnnnnnnnnnnnnnnnnnnnnnnnnnnnnnnnnnnnnnnnnnnnnnnnnnnnnnnnnnnnnnnnnnnnnnnnnnnnnnnnnnnnnnnnnnnnnnnnnnnnnnnnnnnnnnnnnnnnnnnnnnnnnnnnnnnnnnnnnnnnnnnnnnnnnnnnnnnnnnnnnnnnnnnnnnnnnnnnnnnnnnnnnnnnnnnnnnnnnnnnnnnnnnnnnnnnnnnnnnnnnnnnnnnnnnnnnnnnnnnnnnnnnnnnnnnnnnnnnnnnnnnnnnnnnnnnnnnnnnnnnnnnnnnnnnnnnnnnnnnnnnnnnnnnnnnnnnnnnnnnnnnnnnnnnnnnnnnnnnnnnnnnnnnnnnnnnnnnnnnnnnnnnnnnnnnnnnnnnnnnnnnnnnnnnnnnnnnnnnnnnnnnnnnnnnnnnnnnnnnnnnnnnnnnnnnnnnnnnnnnnnnnnnnnnnnnnnnnnnnnnnnnnnnnnnnnnnnnnnnnnnnnnnnnnnnnnnnnnnnnnnnnnnnnnnnnnnnnnnnnnnnnnnnnnnnnnnnnnnnnnnnnnnnnnnnnnnnnnnnnnnnnnnnnnnnnnnnnnnnnnnnnnnnnnnnnnnnnnnnnnnnnnnnnnnnnnnnnnnnnnnnnnnnnnnnnnnnnnnnnnnnnnnnnnnnnnnnnnnnnnnnnnnnnnnnnnnnnnnnnnnnnnnnnnnnnnnnnnnnnnnnnnnnnnnnnnnnnnnnnnnnnnnnnnnnnnnnnnnnnnnnnnnnnnnnnnnnnnnnnnnnnnnnnnnnnnnnnnnnnnnnnnnnnnnnnnnnnnnnnnnnnnnnnnnnnnnnnnnnnnnnnnnnnnnnnnnnnnnnnnnnnnnnnnnnnnnnnnnnnnnnnnnnnnnnnnnnnnnnnnnnnnnnnnnnnnnnnnnnnnnnnnnnnnnnnnnnnnnnnnnnnnnnnnnnnnnnnnnnnnnnnnnnnnnnnnnnnnnnnnnnnnnnnnnnnnnnnnnnnnnnnnnnnnnnnnnnnnnnnnnnnnnnnnnnnnnnnnnnnnnnnnnnnnnnnnnnnnnnnnnnnnnnnnnnnnnnnnnnnnnnnnnnnnnnnnnnnnnnnnnnnnnnnnnnnnnnnnnnnnnnnnnnnnnnnnnnnnnnnnnnnnnnnnnnnnnnnnnnnnnnnnnnnnnnnnnnnnnnnnnnnnnnnnnnnnnnnnnnnnnnnnnnnnnnnnnnnnnnnnnnnnnnnnnnnnnnnnnnnnnnnnnnnnnnnnnnnnnnnnnnnnnnnnnnnnnnnnnnnnnnnnnnnnnnnnnnnnnnnnnnnnnnnnnnnnnnnnnnnnnnnnnnnnnnnnnnnnnnnnnnnnnnnnnnnnnnnnnnnnnnnnnnnnnnnnnnnnnnnnnnnnnnnnnnnnnnnnnnnnnnnnnnnnnnnnnnnnnnnnnnnnnnnnnnnnnnnnnnnnnnnnnnnnnnnnnnnnnnnnnnnnnnnnnnnnnnnnnnnnnnnnnnnnnnnnnnnnnnnnnnnnnnnnnnnnnnnnnnnnnnnnnnnnnnnnnnnnnnnnnnnnnnnnnnnnnnnnnnnnnnnnnnnnnnnnnnnnnnnnnnnnnnnnnnnnnnnnnnnnnnnnnnnnnnnnnnnnnnnnnnnnnnnnnnnnnnnnnnnnnnnnnnnnnnnnnnnnnnnnnnnnnnnnnnnnnnnnnnnnnnnnnnnnnnnnnnnnnnnnnnnnnnnnnnnnnnnnnnnnnnnnnnnnnnnnnnnnnnnnnnnnnnnnnnnnnnnnnnnnnnnnnnnnnnnnnnnnnnnnnnnnnnnnnnnnnnnnnnnnnnnnnnnnnnnnnnnnnnnnnnnnnnnnnnnnnnnnnnnnnnnnnnnnnnnnnnnnnnnnnnnnnnnnnnnnnnnnnnnnnnnnnnnnnnnnnnnnnnnnnnnnnnnnnnnnnnnnnnnnnnnnnnnnnnnnnnnnnnnnnnnnnnnnnnnnnnnnnnnnnnnnnnnnnnnnnnnnnnnnnnnnnnnnnnnnnnnnnnnnnnnnnnnnnnnnnnnnnnnnnnnnnnnnnnnnnnnnnnnnnnnnnnnnnnnnnnnnnnnnnnnnnnnnnnnnnnnnnnnnnnnnnnnnnnnnnnnnnnnnnnnnnnnnnnnnnnnnnnnnnnnnnnnnnnnnnnnnnnnnnnnnnnnnnnnnnnnnnnnnnnnnnnnnnnnnnnnnnnnnnnnnnnnnnnnnnnnnnnnnnnnnnnnnnnnnnnnnnnnnnnnnnnnnnnnnnnnnnnnnnnnnnnnnnnnnnnnnnnnnnnnnnnnnnnnnnnnnnnnnnnnnnnnnnnnnnnnnnnnnnnnnnnnnnnnnnnnnnnnnnnnnnnnnnnnnnnnnnnnnnnnnnnnnnnnnnnnnnnnnnnnnnnnnnnnnnnnnnnnnnnnnnnnnnnnnnnnnnnnnnnnnnnnnnnnnnnnnnnnnnnnnnnnnnnnnnnnnnnnnnnnnnnnnnnnnnnnnnnnnnnnnnnnnnnnnnnnnnnnnnnnnnnnnnnnnnnnnnnnnnnnnnnnnnnnnnnnnnnnnnnnnnnnnnnnnnnnnnnnnnnnnnnnnnnnnnnnnnnnnnnnnnnnnnnnnnnnnnnnnnnnnnnnnnnnnnnnnnnnnnnnnnnnnnnnnnnnnnnnnnnnnnnnnnnnnnnnnnnnnnnnnnnnnnnnnnnnnnnnnnnnnnnnnnnnnnnnnnnnnnnnnnnnnnnnnnnnnnnnnnnnnnnnnnnnnnnnnnnnnnnnnnnnnnnnnnnnnnnnnnnnnnnnnnnnnnnnnnnnnnnnnnnnnnnnnnnnnnnnnnnnnnnnnnnnnnnnnnnnnnnnnnnnnnnnnnnnnnnnnnnnnnnnnnnnnnnnnnnnnnnnnnnnnnnnnnnnnnnnnnnnnnnnnnnnnnnnnnnnnnnnnnnnnnnnnnnnnnnnnnnnnnnnnnnnnnnnnnnnnnnnnnnnnnnnnnnnnnnnnnnnnnnnnnnnnnnnnnnnnnnnnnnnnnnnnnnnnnnnnnnnnnnnnnnnnnnnnnnnnnnnnnnnnnnnnnnnnnnnnnnnnnnnnnnnnnnnnnnnnnnnnnnnnnnnnnnnnnnnnnnnnnnnnnnnnnnnnnnnnnnnnnnnnnnnnnnnnnnnnnnnnnnnnnnnnnnnnnnnnnnnnnnnnnnnnnnnnnnnnnnnnnnnnnnnnnnnnnnnnnnnnnnnnnnnnnnnnnnnnnnnnnnnnnnnnnnnnnnnnnnnnnnnnnnnnnnnnnnnnnnnnnnnnnnnnnnnnnnnnnnnnnnnnnnnnnnnnnnnnnnnnnnnnnnnnnnnnnnnnnnnnnnnnnnnnnnnnnnnnnnnnnnnnnnnnnnnnnnnnnnnnnnnnnnnnnnnnnnnnnnnnnnnnnnnnnnnnnnnnnnnnnnnnnnnnnnnnnnnnnnnnnnnnnnnnnnnnnnnnnnnnnnnnnnnnnnnnnnnnnnnnnnnnnnnnnnnnnnnnnnnnnnnnnnnnnnnnnnnnnnnnnnnnnnnnnnnnnnnnnnnnnnnnnnnnnnnnnnnnnnnnnnnnnnnnnnnnnnnnnnnnnnnnnnnnnnnnnnnnnnnnnnnnnnnnnnnnnnnnnnnnnnnnnnnnnnnnnnnnnnnnnnnnnnnnnnnnnnnnnnnnnnnnnnnnnnnnnnnnnnnnnnnnnnnnnnnnnnnnnnnnnnnnnnnnnnnnnnnnnnnnnnnnnnnnnnnnnnnnnnnnnnnnnnnnnnnnnnnnnnnnnnnnnnnnnnnnnnnnnnnnnnnnnnnnnnnnnnnnnnnnnnnnnnnnnnnnnnnnnnnnnnnnnnnnnnnnnnnnnnnnnnnnnnnnnnnnnnnnnnnnnnnnnnnnnnnnnnnnnnnnnnnnnnnnnnnnnnnnnnnnnnnnnnnnnnnnnnnnnnnnnnnnnnnnnnnnnnnnnnnnnnnnnnnnnnnnnnnnnnnnnnnnnnnnnnnnnnnnnnnnnnnnnnnnnnnnnnnnnnnnnnnnnnnnnnnnnnnnnnnnnnnnnnnnnnnnnnnnnnnnnnnnnnnnnnnnnnnnnnnnnnnnnnnnnnnnnnnnnnnnnnnnnnnnnnnnnnnnnnnnnnnnnnnnnnnnnnnnnnnnnnnnnnnnnnnnnnnnnnnnnnnnnnnnnnnnnnnnnnnnnnnnnnnnnnnnnnnnnnnnnnnnnnnnnnnnnnnnnnnnnnnnnnnnnnnnnnnnnnnnnnnnnnnnnnnnnnnnnnnnnnnnnnnnnnnnnnnnnnnnnnnnnnnnnnnnnnnnnnnnnnnnnnnnnnnnnnnnnnnnnnnnnnnnnnnnnnnnnnnnnnnnnnnnnnnnnnnnnnnnnnnnnnnnnnnnnnnnnnnnnnnnnnnnnnnnnnnnnnnnnnnnnnnnnnnnnnnnnnnnnnnnnnnnnnnnnnnnnnnnnnnnnnnnnnnnnnnnnnnnnnnnnnnnnnnnnnnnnnnnnnnnnnnnnnnnnnnnnnnnnnnnnnnnnnnnnnnnnnnnnnnnnnnnnnnnnnnnnnnnnnnnnnnnnnnnnnnnnnnnnnnnnnnnnnnnnnnnnnnnnnnnnnnnnnnnnnnnnnnnnnnnnnnnnnnnnnnnnnnnnnnnnnnnnnnnnnnnnnnnnnnnnnnnnnnnnnnnnnnnnnnnnnnnnnnnnnnnnnnnnnnnnnnnnnnnnnnnnnnnnnnnnnnnnnnnnnnnnnnnnnnnnnnnnnnnnnnnnnnnnnnnnnnnnnnnnnnnnnnnnnnnnnnnnnnnnnnnnnnnnnnnnnnnnnnnnnnnnnnnnnnnnnnnnnnnnnnnnnnnnnnnnnnnnnnnnnnnnnnnnnnnnnnnnnnnnnnnnnnnnnnnnnnnnnnnnnnnnnnnnnnnnnnnnnnnnnnnnnnnnnnnnnnnnnnnnnnnnnnnnnnnnnnnnnnnnnnnnnnnnnnnnnnnnnnnnnnnnnnnnnnnnnnnnnnnnnnnnnnnnnnnnnnnnnnnnnnnnnnnnnnnnnnnnnnnnnnnnnnnnnnnnnnnnnnnnnnnnnnnnnnnnnnnnnnnnnnnnnnnnnnnnnnnnnnnnnnnnnnnnnnnnnnnnnnnnnnnnnnnnnnnnnnnnnnnnnnnnnnnnnnnnnnnnnnnnnnnnnnnnnnnnnnnnnnnnnnnnnnnnnnnnnnnnnnnnnnnnnnnnnnnnnnnnnnnnnnnnnnnnnnnnnnnnnnnnnnnnnnnnnnnnnnnnnnnnnnnnnnnnnnnnnnnnnnnnnnnnnnnnnnnnnnnnnnnnnnnnnnnnnnnnnnnnnnnnnnnnnnnnnnnnnnnnnnnnnnnnnnnnnnnnnnnnnnnnnnnnnnnnnnnnnnnnnnnnnnnnnnnnnnnnnnnnnnnnnnnnnnnnnnnnnnnnnnnnnnnnnnnnnnnnnnnnnnnnnnnnnnnnnnnnnnnnnnnnnnnnnnnnnnnnnnnnnnnnnnnnnnnnnnnnnnnnnnnnnnnnnnnnnnnnnnnnnnnnnnnnnnnnnnnnnnnnnnnnnnnnnnnnnnnnnnnnnnnnnnnnnnnnnnnnnnnnnnnnnnnnnnnnnnnnnnnnnnnnnnnnnnnnnnnnnnnnnnnnnnnnnnnnnnnnnnnnnnnnnnnnnnnnnnnnnnnnnnnnnnnnnnnnnnnnnnnnnnnnnnnnnnnnnnnnnnnnnnnnnnnnnnnnnnnnnnnnnnnnnnnnnnnnnnnnnnnnnnnnnnnnnnnnnnnnnnnnnnnnnnnnnnnnnnnnnnnnnnnnnnnnnnnnnnnnnnnnnnnnnnnnnnnnnnnnnnnnnnnnnnnnnnnnnnnnnnnnnnnnnnnnnnnnnnnnnnnnnnnnnnnnnnnnnnnnnnnnnnnnnnnnnnnnnnnnnnnnnnnnnnnnnnnnnnnnnnnnnnnnnnnnnnnnnnnnnnnnnnnnnnnnnnnnnnnnnnnnnnnnnnnnnnnnnnnnnnnnnnnnnnnnnnnnnnnnnnnnnnnnnnnnnnnnnnnnnnnnnnnnnnnnnnnnnnnnnnnnnnnnnnnnnnnnnnnnnnnnnnnnnnnnnnnnnnnnnnnnnnnnnnnnnnnnnnnnnnnnnnnnnnnnnnnnnnnnnnnnnnnnnnnnnnnnnnnnnnnnnnnnnnnnnnnnnnnnnnnnnnnnnnnnnnnnnnnnnnnnnnnnnnnnnnnnnnnnnnnnnnnnnnnnnnnnnnnnnnnnnnnnnnnnnnnnnnnnnnnnnnnnnnnnnnnnnnnnnnnnnnnnnnnnnnnnnnnnnnnnnnnnnnnnnnnnnnnnnnnnnnnnnnnnnnnnnnnnnnnnnnnnnnnnnnnnnnnnnnnnnnnnnnnnnnnnnnnnnnnnnnnnnnnnnnnnnnnnnnnnnnnnnnnnnnnnnnnnnnnnnnnnnnnnnnnnnnnnnnnnnnnnnnnnnnnnnnnnnnnnnnnnnnnnnnnnnnnnnnnnnnnnnnnnnnnnnnnnnnnnnnnnnnnnnnnnnnnnnnnnnnnnnnnnnnnnnnnnnnnnnnnnnnnnnnnnnnnnnnnnnnnnnnnnnnnnnnnnnnnnnnnnnnnnnnnnnnnnnnnnnnnnnnnnnnnnnnnnnnnnnnnnnnnnnnnnnnnnnnnnnnnnnnnnnnnnnnnnnnnnnnnnnnnnnnnnnnnnnnnnnnnnnnnnnnnnnnnnnnnnnnnnnnnnnnnnnnnnnnnnnnnnnnnnnnnnnnnnnnnnnnnnnnnnnnnnnnnnnnnnnnnnnnnnnnnnnnnnnnnnnnnnnnnnnnnnnnnnnnnnnnnnnnnnnnnnnnnnnnnnnnnnnnnnnnnnnnnnnnnnnnnnnnnnnnnnnnnnnnnnnnnnnnnnnnnnnnnnnnnnnnnnnnnnnnnnnnnnnnnnnnnnnnnnnnnnnnnnnnnnnnnnnnnnnnnnnnnnnnnnnnnnnnnnnnnnnnnnnnnnnnnnnnnnnnnnnnnnnnnnnnnnnnnnnnnnnnnnnnnnnnnnnnnnnnnnnnnnnnnnnnnnnnnnnnnnnnnnnnnnnnnnnnnnnnnnnnnnnnnnnnnnnnnnnnnnnnnnnnnnnnnnnnnnnnnnnnnnnnnnnnnnnnnnnnnnnnnnnnnnnnnnnnnnnnnnnnnnnnnnnnnnnnnnnnnnnnnnnnnnnnnnnnnnnnnnnnnnnnnnnnnnnnnnnnnnnnnnnnnnnnnnnnnnnnnnnnnnnnnnnnnnnnnnnnnnnnnnnnnnnnnnnnnnnnnnnnnnnnnnnnnnnnnnnnnnnnnnnnnnnnnnnnnnnnnnnnnnnnnnnnnnnnnnnnnnnnnnnnnnnnnnnnnnnnnnnnnnnnnnnnnnnnnnnnnnnnnnnnnnnnnnnnnnnnnnnnnnnnnnnnnnnnnnnnnnnnnnnnnnnnnnnnnnnnnnnnnnnnnnnnnnnnnnnnnnnnnnnnnnnnnnnnnnnnnnnnnnnnnnnnnnnnnnnnnnnnnnnnnnnnnnnnnnnnnnnnnnnnnnnnnnnnnnnnnnnnnnnnnnnnnnnnnnnnnnnnnnnnnnnnnnnnnnnnnnnnnnnnnnnnnnnnnnnnnnnnnnnnnnnnnnnnnnnnnnnnnnnnnnnnnnnnnnnnnnnnnnnnnnnnnnnnnnnnnnnnnnnnnnnnnnnnnnnnnnnnnnnnnnnnnnnnnnnnnnnnnnnnnnnnnnnnnnnnnnnnnnnnnnnnnnnnnnnnnnnnnnnnnnnnnnnnnnnnnnnnnnnnnnnnnnnnnnnnnnnnnnnnnnnnnnnnnnnnnnnnnnnnnnnnnnnnnnnnnnnnnnnnnnnnnnnnnnnnnnnnnnnnnnnnnnnnnnnnnnnnnnnnnnnnnnnnnnnnnnnnnnnnnnnnnnnnnnnnnnnnnnnnnnnnnnnnnnnnnnnnnnnnnnnnnnnnnnnnnnnnnnnnnnnnnnnnnnnnnnnnnnnnnnnnnnnnnnnnnnnnnnnnnnnnnnnnnnnnnnnnnnnnnnnnnnnnnnnnnnnnnnnnnnnnnnnnnnnnnnnnnnnnnnnnnnnnnnnnnnnnnnnnnnnnnnnnnnnnnnnnnnnnnnnnnnnnnnnnnnnnnnnnnnnnnnnnnnnnnnnnnnnnnnnnnnnnnnnnnnnnnnnnnnnnnnnnnnnnnnnnnnnnnnnnnnnnnnnnnnnnnnnnnnnnnnnnnnnnnnnnnnnnnnnnnnnnnnnnnnnnnnnnnnnnnnnnnnnnnnnnnnnnnnnnnnnnnnnnnnnnnnnnnnnnnnnnnnnnnnnnnnnnnnnnnnnnnnnnnnnnnnnnnnnnnnnnnnnnnnnnnnnnnnnnnnnnnnnnnnnnnnnnnnnnnnnnnnnnnnnnnnnnnnnnnnnnnnnnnnnnnnnnnnnnnnnnnnnnnnnnnnnnnnnnnnnnnnnnnnnnnnnnnnnnnnnnnnnnnnnnnnnnnnnnnnnnnnnnnnnnnnnnnnnnnnnnnnnnnnnnnnnnnnnnnnnnnnnnnnnnnnnnnnnnnnnnnnnnnnnnnnnnnnnnnnnnnnnnnnnnnnnnnnnnnnnnnnnnnnnnnnnnnnnnnnnnnnnnnnnnnnnnnnnnnnnnnnnnnnnnnnnnnnnnnnnnnnnnnnnnnnnnnnnnnnnnnnnnnnnnnnnnnnnnnnnnnnnnnnnnnnnnnnnnnnnnnnnnnnnnnnnnnnnnnnnnnnnnnnnnnnnnnnnnnnnnnnnnnnnnnnnnnnnnnnnnnnnnnnnnnnnnnnnnnnnnnnnnnnnnnnnnnnnnnnnnnnnnnnnnnnnnnnnnnnnnnnnnnnnnnnnnnnnnnnnnnnnnnnnnnnnnnnnnnnnnnnnnnnnnnnnnnnnnnnnnnnnnnnnnnnnnnnnnnnnnnnnnnnnnnnnnnnnnnnnnnnnnnnnnnnnnnnnnnnnnnnnnnnnnnnnnnnnnnnnnnnnnnnnnnnnnnnnnnnnnnnnnnnnnnnnnnnnnnnnnnnnnnnnnnnnnnnnnnnnnnnnnnnnnnnnnnnnnnnnnnnnnnnnnnnnnnnnnnnnnnnnnnnnnnnnnnnnnnnnnnnnnnnnnnnnnnnnnnnnnnnnnnnnnnnnnnnnnnnnnnnnnnnnnnnnnnnnnnnnnnnnnnnnnnnnnnnnnnnnnnnnnnnnnnnnnnnnnnnnnnnnnnnnnnnnnnnnnnnnnnnnnnnnnnnnnnnnnnnnnnnnnnnnnnnnnnnnnnnnnnnnnnnnnnnnnnnnnnnnnnnnnnnnnnnnnnnnnnnnnnnnnnnnnnnnnnnnnnnnnnnnnnnnnnnnnnnnnnnnnnnnnnnnnnnnnnnnnnnnnnnnnnnnnnnnnnnnnnnnnnnnnnnnnnnnnnnnnnnnnnnnnnnnnnnnnnnnnnnnnnnnnnnnnnnnnnnnnnnnnnnnnnnnnnnnnnnnnnnnnnnnnnnnnnnnnnnnnnnnnnnnnnnnnnnnnnnnnnnnnnnnnnnnnnnnnnnnnnnnnnnnnnnnnnnnnnnnnnnnnnnnnnnnnnnnnnnnnnnnnnnnnnnnnnnnnnnnnnnnnnnnnnnnnnnnnnnnnnnnnnnnnnnnnnnnnnnnnnnnnnnnnnnnnnnnnnnnnnnnnnnnnnnnnnnnnnnnnnnnnnnnnnnnnnnnnnnnnnnnnnnnnnnnnnnnnnnnnnnnnnnnnnnnnnnnnnnnnnnnnnnnnnnnnnnnnnnnnnnnnnnnnnnnnnnnnnnnnnnnnnnnnnnnnnnnnnnnnnnnnnnnnnnnnnnnnnnnnnnnnnnnnnnnnnnnnnnnnnnnnnnnnnnnnnnnnnnnnnnnnnnnnnnnnnnnnnnnnnnnnnnnnnnnnnnnnnnnnnnnnnnnnnnnnnnnnnnnnnnnnnnnnnnnnnnnnnnnnnnnnnnnnnnnnnnnnnnnnnnnnnnnnnnnnnnnnnnnnnnnnnnnnnnnnnnnnnnnnnnnnnnnnnnnnnnnnnnnnnnnnnnnnnnnnnnnnnnnnnnnnnnnnnnnnnnnnnnnnnnnnnnnnnnnnnnnnnnnnnnnnnnnnnnnnnnnnnnnnnnnnnnnnnnnnnnnnnnnnnnnnnnnnnnnnnnnnnnnnnnnnnnnnnnnnnnnnnnnnnnnnnnnnnnnnnnnnnnnnnnnnnnnnnnnnnnnnnnnnnnnnnnnnnnnnnnnnnnnnnnnnnnnnnnnnnnnnnnnnnnnnnnnnnnnnnnnnnnnnnnnnnnnnnnnnnnnnnnnnnnnnnnnnnnnnnnnnnnnnnnnnnnnnnnnnnnnnnnnnnnnnnnnnnnnnnnnnnnnnnnnnnnnnnnnnnnnnnnnnnnnnnnnnnnnnnnnnnnnnnnnnnnnnnnnnnnnnnnnnnnnnnnnnnnnnnnnnnnnnnnnnnnnnnnnnnnnnnnnnnnnnnnnnnnnnnnnnnnnnnnnnnnnnnnnnnnnnnnnnnnnnnnnnnnnnnnnnnnnnnnnnnnnnnnnnnnnnnnnnnnnnnnnnnnnnnnnnnnnnnnnnnnnnnnnnnnnnnnnnnnnnnnnnnnnnnnnnnnnnnnnnnnnnnnnnnnnnnnnnnnnnnnnnnnnnnnnnnnnnnnnnnnnnnnnnnnnnnnnnnnnnnnnnnnnnnnnnnnnnnnnnnnnnnnnnnnnnnnnnnnnnnnnnnnnnnnnnnnnnnnnnnnnnnnnnnnnnnnnnnnnnnnnnnnnnnnnnnnnnnnnnnnnnnnnnnnnnnnnnnnnnnnnnnnnnnnnnnnnnnnnnnnnnnnnnnnnnnnnnnnnnnnnnnnnnnnnnnnnnnnnnnnnnnnnnnnnnnnnnnnnnnnnnnnnnnnnnnnnnnnnnnnnnnnnnnnnnnnnnnnnnnnnnnnnnnnnnnnnnnnnnnnnnnnnnnnnnnnnnnnnnnnnnnnnnnnnnnnnnnnnnnnnnnnnnnnnnnnnnnnnnnnnnnnnnnnnnnnnnnnnnnnnnnnnnnnnnnnnnnnnnnnnnnnnnnnnnnnnnnnnnnnnnnnnnnnnnnnnnnnnnnnnnnnnnnnnnnnnnnnnnnnnnnnnnnnnnnnnnnnnnnnnnnnnnnnnnnnnnnnnnnnnnnnnnnnnnnnnnnnnnnnnnnnnnnnnnnnnnnnnnnnnnnnnnnnnnnnnnnnnnnnnnnnnnnnnnnnnnnnnnnnnnnnnnnnnnnnnnnnnnnnnnnnnnnnnnnnnnnnnnnnnnnnnnnnnnnnnnnnnnnnnnnnnnnnnnnnnnnnnnnnnnnnnnnnnnnnnnnnnnnnnnnnnnnnnnnnnnnnnnnnnnnnnnnnnnnnnnnnnnnnnnnnnnnnnnnnnnnnnnnnnnnnnnnnnnnnnnnnnnnnnnnnnnnnnnnnnnnnnnnnnnnnnnnnnnnnnnnnnnnnnnnnnnnnnnnnnnnnnnnnnnnnnnnnnnnnnnnnnnnnnnnnnnnnnnnnnnnnnnnnnnnnnnnnnnnnnnnnnnnnnnnnnnnnnnnnnnnnnnnnnnnnnnnnnnnnnnnnnnnnnnnnnnnnnnnnnnnnnnnnnnnnnnnnnnnnnnnnnnnnnnnnnnnnnnnnnnnnnnnnnnnnnnnnnnnnnnnnnnnnnnnnnnnnnnnnnnnnnnnnnnnnnnnnnnnnnnnnnnnnnnnnnnnnnnnnnnnnnnnnnnnnnnnnnnnnnnnnnnnnnnnnnnnnnnnnnnnnnnnnnnnnnnnnnnnnnnnnnnnnnnnnnnnnnnnnnnnnnnnnnnnnnnnnnnnnnnnnnnnnnnnnnnnnnnnnnnnnnnnnnnnnnnnnnnnnnnnnnnnnnnnnnnnnnnnnnnnnnnnnnnnnnnnnnnnnnnnnnnnnnnnnnnnnnnnnnnnnnnnnnnnnnnnnnnnnnnnnnnnnnnnnnnnnnnnnnnnnnnnnnnnnnnnnnnnnnnnnnnnnnnnnnnnnnnnnnnnnnnnnnnnnnnnnnnnnnnnnnnnnnnnnnnnnnnnnnnnnnnnnnnnnnnnnnnnnnnnnnnnnnnnnnnnnnnnnnnnnnnnnnnnnnnnnnnnnnnnnnnnnnnnnnnnnnnnnnnnnnnnnnnnnnnnnnnnnnnnnnnnnnnnnnnnnnnnnnnnnnnnnnnnnnnnnnnnnnnnnnnnnnnnnnnnnnnnnnnnnnnnnnnnnnnnnnnnnnnnnnnnnnnnnnnnnnnnnnnnnnnnnnnnnnnnnnnnnnnnnnnnnnnnnnnnnnnnnnnnnnnnnnnnnnnnnnnnnnnnnnnnnnnnnnnnnnnnnnnnnnnnnnnnnnnnnnnnnnnnnnnnnnnnnnnnnnnnnnnnnnnnnnnnnnnnnnnnnnnnnnnnnnnnnnnnnnnnnnnnnnnnnnnnnnnnnnnnnnnnnnnnnnnnnnnnnnnnnnnnnnnnnnnnnnnnnnnnnnnnnnnnnnnnnnnnnnnnnnnnnnnnnnnnnnnnnnnnnnnnnnnnnnnnnnnnnnnnnnnnnnnnnnnnnnnnnnnnnnnnnnnnnnnnnnnnnnnnnnnnnnnnnnnnnnnnnnnnnnnnnnnnnnnnnnnnnnnnnnnnnnnnnnnnnnnnnnnnnnnnnnnnnnnnnnnnnnnnnnnnnnnnnnnnnnnnnnnnnnnnnnnnnnnnnnnnnnnnnnnnnnnnnnnnnnnnnnnnnnnnnnnnnnnnnnnnnnnnnnnnnnnnnnnnnnnnnnnnnnnnnnnnnnnnnnnnnnnnnnnnnnnnnnnnnnnnnnnnnnnnnnnnnnnnnnnnnnnnnnnnnnnnnnnnnnnnnnnnnnnnnnnnnnnnnnnnnnnnnnnnnnnnnnnnnnnnnnnnnnnnnnnnnnnnnnnnnnnnnnnnnnnnnnnnnnnnnnnnnnnnnnnnnnnnnnnnnnnnnnnnnnnnnnnnnnnnnnnnnnnnnnnnnnnnnnnnnnnnnnnnnnnnnnnnnnnnnnnnnnnnnnnnnnnnnnnnnnnnnnnnnnnnnnnnnnnnnnnnnnnnnnnnnnnnnnnnnnnnnnnnnnnnnnnnnnnnnnnnnnnnnnnnnnnnnnnnnnnnnnnnnnnnnnnnnnnnnnnnnnnnnnnnnnnnnnnnnnnnnnnnnnnnnnnnnnnnnnnnnnnnnnnnnnnnnnnnnnnnnnnnnnnnnnnnnnnnnnnnnnnnnnnnnnnnnnnnnnnnnnnnnnnnnnnnnnnnnnnnnnnnnnnnnnnnnnnnnnnnnnnnnnnnnnnnnnnnnnnnnnnnnnnnnnnnnnnnnnnnnnnnnnnnnnnnnnnnnnnnnnnnnnnnnnnnnnnnnnnnnnnnnnnnnnnnnnnnnnnnnnnnnnnnnnnnnnnnnnnnnnnnnnnnnnnnnnnnnnnnnnnnnnnnnnnnnnnnnnnnnnnnnnnnnnnnnnnnnnnnnnnnnnnnnnnnnnnnnnnnnnnnnnnnnnnnnnnnnnnnnnnnnnnnnnnnnnnnnnnnnnnnnnnnnnnnnnnnnnnnnnnnnnnnnnnnnnnnnnnnnnnnnnnnnnnnnnnnnnnnnnnnnnnnnnnnnnnnnnnnnnnnnnnnnnnnnnnnnnnnnnnnnnnnnnnnnnnnnnnnnnnnnnnnnnnnnnnnnnnnnnnnnnnnnnnnnnnnnnnnnnnnnnnnnnnnnnnnnnnnnnnnnnnnnnnnnnnnnnnnnnnnnnnnnnnnnnnnnnnnnnnnnnnnnnnnnnnnnnnnnnnnnnnnnnnnnnnnnnnnnnnnnnnnnnnnnnnnnnnnnnnnnnnnnnnnnnnnnnnnnnnnnnnnnnnnnnnnnnnnnnnnnnnnnnnnnnnnnnnnnnnnnnnnnnnnnnnnnnnnnnnnnnnnnnnnnnnnnnnnnnnnnnnnnnnnnnnnnnnnnnnnnnnnnnnnnnnnnnnnnnnnnnnnnnnnnnnnnnnnnnnnnnnnnnnnnnnnnnnnnnnnnnnnnnnnnnnnnnnnnnnnnnnnnnnnnnnnnnnnnnnnnnnnnnnnnnnnnnnnnnnnnnnnnnnnnnnnnnnnnnnnnnnnnnnnnnnnnnnnnnnnnnnnnnnnnnnnnnnnnnnnnnnnnnnnnnnnnnnnnnnnnnnnnnnnnnnnnnnnnnnnnnnnnnnnnnnnnnnnnnnnnnnnnnnnnnnnnnnnnnnnnnnnnnnnnnnnnnnnnnnnnnnnnnnnnnnnnnnnnnnnnnnnnnnnnnnnnnnnnnnnnnnnnnnnnnnnnnnnnnnnnnnnnnnnnnnnnnnnnnnnnnnnnnnnnnnnnnnnnnnnnnnnnnnnnnnnnnnnnnnnnnnnnnnnnnnnnnnnnnnnnnnnnnnnnnnnnnnnnnnnnnnnnnnnnnnnnnnnnnnnnnnnnnnnnnnnnnnnnnnnnnnnnnnnnnnnnnnnnnnnnnnnnnnnnnnnnnnnnnnnnnnnnnnnnnnnnnnnnnnnnnnnnnnnnnnnnnnnnnnnnnnnnnnnnnnnnnnnnnnnnnnnnnnnnnnnnnnnnnnnnnnnnnnnnnnnnnnnnnnnnnnnnnnnnnnnnnnnnnnnnnnnnnnnnnnnnnnnnnnnnnnnnnnnnnnnnnnnnnnnnnnnnnnnnnnnnnnnnnnnnnnnnnnnnnnnnnnnnnnnnnnnnnnnnnnnnnnnnnnnnnnnnnnnnnnnnnnnnnnnnnnnnnnnnnnnnnnnnnnnnnnnnnnnnnnnnnnnnnnnnnnnnnnnnnnnnnnnnnnnnnnnnnnnnnnnnnnnnnnnnnnnnnnnnnnnnnnnnnnnnnnnnnnnnnnnnnnnnnnnnnnnnnnnnnnnnnnnnnnnnnnnnnnnnnnnnnnnnnnnnnnnnnnnnnnnnnnnnnnnnnnnnnnnnnnnnnnnnnnnnnnnnnnnnnnnnnnnnnnnnnnnnnnnnnnnnnnnnnnnnnnnnnnnnnnnnnnnnnnnnnnnnnnnnnnnnnnnnnnnnnnnnnnnnnnnnnnnnnnnnnnnnnnnnnnnnnnnnnnnnnnnnnnnnnnnnnnnnnnnnnnnnnnnnnnnnnnnnnnnnnnnnnnnnnnnnnnnnnnnnnnnnnnnnnnnnnnnnnnnnnnnnnnnnnnnnnnnnnnnnnnnnnnnnnnnnnnnnnnnnnnnnnnnnnnnnnnnnnnnnnnnnnnnnnnnnnnnnnnnnnnnnnnnnnnnnnnnnnnnnnnnnnnnnnnnnnnnnnnnnnnnnnnnnnnnnnnnnnnnnnnnnnnnnnnnnnnnnnnnnnnnnnnnnnnnnnnnnnnnnnnnnnnnnnnnnnnnnnnnnnnnnnnnnnnnnnnnnnnnnnnnnnnnnnnnnnnnnnnnnnnnnnnnnnnnnnnnnnnnnnnnnnnnnnnnnnnnnnnnnnnnnnnnnnnnnnnnnnnnnnnnnnnnnnnnnnnnnnnnnnnnnnnnnnnnnnnnnnnnnnnnnnnnnnnnnnnnnnnnnnnnnnnnnnnnnnnnnnnnnnnnnnnnnnnnnnnnnnnnnnnnnnnnnnnnnnnnnnnnnnnnnnnnnnnnnnnnnnnnnnnnnnnnnnnnnnnnnnnnnnnnnnnnnnnnnnnnnnnnnnnnnnnnnnnnnnnnnnnnnnnnnnnnnnnnnnnnnnnnnnnnnnnnnnnnnnnnnnnnnnnnnnnnnnnnnnnnnnnnnnnnnnnnnnnnnnnnnnnnnnnnnnnnnnnnnnnnnnnnnnnnnnnnnnnnnnnnnnnnnnnnnnnnnnnnnnnnnnnnnnnnnnnnnnnnnnnnnnnnnnnnnnnnnnnnnnnnnnnnnnnnnnnnnnnnnnnnnnnnnnnnnnnnnnnnnnnnnnnnnnnnnnnnnnnnnnnnnnnnnnnnnnnnnnnnnnnnnnnnnnnnnnnnnnnnnnnnnnnnnnnnnnnnnnnnnnnnnnnnnnnnnnnnnnnnnnnnnnnnnnnnnnnnnnnnnnnnnnnnnnnnnnnnnnnnnnnnnnnnnnnnnnnnnnnnnnnnnnnnnnnnnnnnnnnnnnnnnnnnnnnnnnnnnnnnnnnnnnnnnnnnnnnnnnnnnnnnnnnnnnnnnnnnnnnnnnnnnnnnnnnnnnnnnnnnnnnnnnnnnnnnnnnnnnnnnnnnnnnnnnnnnnnnnnnnnnnnnnnnnnnnnnnnnnnnnnnnnnnnnnnnnnnnnnnnnnnnnnnnnnnnnnnnnnnnnnnnnnnnnnnnnnnnnnnnnnnnnnnnnnnnnnnnnnnnnnnnnnnnnnnnnnnnnnnnnnnnnnnnnnnnnnnnnnnnnnnnnnnnnnnnnnnnnnnnnnnnnnnnnnnnnnnnnnnnnnnnnnnnnnnnnnnnnnnnnnnnnnnnnnnnnnnnnnnnnnnnnnnnnnnnnnnnnnnnnnnnnnnnnnnnnnnnnnnnnnnnnnnnnnnnnnnnnnnnnnnnnnnnnnnnnnnnnnnnnnnnnnnnnnnnnnnnnnnnnnnnnnnnnnnnnnnnnnnnnnnnnnnnnnnnnnnnnnnnnnnnnnnnnnnnnnnnnnnnnnnnnnnnnnnnnnnnnnnnnnnnnnnnnnnnnnnnnnnnnnnnnnnnnnnnnnnnnnnnnnnnnnnnnnnnnnnnnnnnnnnnnnnnnnnnnnnnnnnnnnnnnnnnnnnnnnnnnnnnnnnnnnnnnnnnnnnnnnnnnnnnnnnnnnnnnnnnnnnnnnnnnnnnnnnnnnnnnnnnnnnnnnnnnnnnnnnnnnnnnnnnnnnnnnnnnnnnnnnnnnnnnnnnnnnnnnnnnnnnnnnnnnnnnnnnnnnnnnnnnnnnnnnnnnnnnnnnnnnnnnnnnnnnnnnnnnnnnnnnnnnnnnnnnnnnnnnnnnnnnnnnnnnnnnnnnnnnnnnnnnnnnnnnnnnnnnnnnnnnnnnnnnnnnnnnnnnnnnnnnnnnnnnnnnnnnnnnnnnnnnnnnnnnnnnnnnnnnnnnnnnnnnnnnnnnnnnnnnnnnnnnnnnnnnnnnnnnnnnnnnnnnnnnnnnnnnnnnnnnnnnnnnnnnnnnnnnnnnnnnnnnnnnnnnnnnnnnnnnnnnnnnnnnnnnnnnnnnnnnnnnnnnnnnnnnnnnnnnnnnnnnnnnnnnnnnnnnnnnnnnnnnnnnnnnnnnnnnnnnnnnnnnnnnnnnnnnnnnnnnnnnnnnnnnnnnnnnnnnnnnnnnnnnnnnnnnnnnnnnnnnnnnnnnnnnnnnnnnnnnnnnnnnnnnnnnnnnnnnnnnnnnnnnnnnnnnnnnnnnnnnnnnnnnnnnnnnnnnnnnnnnnnnnnnnnnnnnnnnnnnnnnnnnnnnnnnnnnnnnnnnnnnnnnnnnnnnnnnnnnnnnnnnnnnnnnnnnnnnnnnnnnnnnnnnnnnnnnnnnnnnnnnnnnnnnnnnnnnnnnnnnnnnnnnnnnnnnnnnnnnnnnnnnnnnnnnnnnnnnnnnnnnnnnnnnnnnnnnnnnnnnnnnnnnnnnnnnnnnnnnnnnnnnnnnnnnnnnnnnnnnnnnnnnnnnnnnnnnnnnnnnnnnnnnnnnnnnnnnnnnnnnnnnnnnnnnnnnnnnnnnnnnnnnnnnnnnnnnnnnnnnnnnnnnnnnnnnnnnnnnnnnnnnnnnnnnnnnnnnnnnnnnnnnnnnnnnnnnnnnnnnnnnnnnnnnnnnnnnnnnnnnnnnnnnnnnnnnnnnnnnnnnnnnnnnnnnnnnnnnnnnnnnnnnnnnnnnnnnnnnnnnnnnnnnnnnnnnnnnnnnnnnnnnnnnnnnnnnnnnnnnnnnnnnnnnnnnnnnnnnnnnnnnnnnnnnnnnnnnnnnnnnnnnnnnnnnnnnnnnnnnnnnnnnnnnnnnnnnnnnnnnnnnnnnnnnnnnnnnnnnnnnnnnnnnnnnnnnnnnnnnnnnnnnnnnnnnnnnnnnnnnnnnnnnnnnnnnnnnnnnnnnnnnnnnnnnnnnnnnnnnnnnnnnnnnnnnnnnnnnnnnnnnnnnnnnnnnnnnnnnnnnnnnnnnnnnnnnnnnnnnnnnnnnnnnnnnnnnnnnnnnnnnnnnnnnnnnnnnnnnnnnnnnnnnnnnnnnnnnnnnnnnnnnnnnnnnnnnnnnnnnnnnnnnnnnnnnnnnnnnnnnnnnnnnnnnnnnnnnnnnnnnnnnnnnnnnnnnnnnnnnnnnnnnnnnnnnnnnnnnnnnnnnnnnnnnnnnnnnnnnnnnnnnnnnnnnnnnnnnnnnnnnnnnnnnnnnnnnnnnnnnnnnnnnnnnnnnnnnnnnnnnnnnnnnnnnnnnnnnnnnnnnnnnnnnnnnnnnnnnnnnnnnnnnnnnnnnnnnnnnnnnnnnnnnnnnnnnnnnnnnnnnnnnnnnnnnnnnnnnnnnnnnnnnnnnnnnnnnnnnnnnnnnnnnnnnnnnnnnnnnnnnnnnnnnnnnnnnnnnnnnnnnnnnnnnnnnnnnnnnnnnnnnnnnnnnnnnnnnnnnnnnnnnnnnnnnnnnnnnnnnnnnnnnnnnnnnnnnnnnnnnnnnnnnnnnnnnnnnnnnnnnnnnnnnnnnnnnnnnnnnnnnnnnnnnnnnnnnnnnnnnnnnnnnnnnnnnnnnnnnnnnnnnnnnnnnnnnnnnnnnnnnnnnnnnnnnnnnnnnnnnnnnnnnnnnnnnnnnnnnnnnnnnnnnnnnnnnnnnnnnnnnnnnnnnnnnnnnnnnnnnnnnnnnnnnnnnnnnnnnnnnnnnnnnnnnnnnnnnnnnnnnnnnnnnnnnnnnnnnnnnnnnnnnnnnnnnnnnnnnnnnnnnnnnnnnnnnnnnnnnnnnnnnnnnnnnnnnnnnnnnnnnnnnnnnnnnnnnnnnnnnnnnnnnnnnnnnnnnnnnnnnnnnnnnnnnnnnnnnnnnnnnnnnnnnnnnnnnnnnnnnnnnnnnnnnnnnnnnnnnnnnnnnnnnnnnnnnnnnnnnnnnnnnnnnnnnnnnnnnnnnnnnnnnnnnnnnnnnnnnnnnnnnnnnnnnnnnnnnnnnnnnnnnnnnnnnnnnnnnnnnnnnnnnnnnnnnnnnnnnnnnnnnnnnnnnnnnnnnnnnnnnnnnnnnnnnnnnnnnnnnnnnnnnnnnnnnnnnnnnnnnnnnnnnnnnnnnnnnnnnnnnnnnnnnnnnnnnnnnnnnnnnnnnnnnnnnnnnnnnnnnnnnnnnnnnnnnnnnnnnnnnnnnnnnnnnnnnnnnnnnnnnnnnnnnnnnnnnnnnnnnnnnnnnnnnnnnnnnnnnnnnnnnnnnnnnnnnnnnnnnnnnnnnnnnnnnnnnnnnnnnnnnnnnnnnnnnnnnnnnnnnnnnnnnnnnnnnnnnnnnnnnnnnnnnnnnnnnnnnnnnnnnnnnnnnnnnnnnnnnnnnnnnnnnnnnnnnnnnnnnnnnnnnnnnnnnnnnnnnnnnnnnnnnnnnnnnnnnnnnnnnnnnnnnnnnnnnnnnnnnnnnnnnnnnnnnnnnnnnnnnnnnnnnnnnnnnnnnnnnnnnnnnnnnnnnnnnnnnnnnnnnnnnnnnnnnnnnnnnnnnnnnnnnnnnnnnnnnnnnnnnnnnnnnnnnnnnnnnnnnnnnnnnnnnnnnnnnnnnnnnnnnnnnnnnnnnnnnnnnnnnnnnnnnnnnnnnnnnnnnnnnnnnnnnnnnnnnnnnnnnnnnnnnnnnnnnnnnnnnnnnnnnnnnnnnnnnnnnnnnnnnnnnnnnnnnnnnnnnnnnnnnnnnnnnnnnnnnnnnnnnnnnnnnnnnnnnnnnnnnnnnnnnnnnnnnnnnnnnnnnnnnnnnnnnnnnnnnnnnnnnnnnnnnnnnnnnnnnnnnnnnnnnnnnnnnnnnnnnnnnnnnnnnnnnnnnnnnnnnnnnnnnnnnnnnnnnnnnnnnnnnnnnnnnnnnnnnnnnnnnnnnnnnnnnnnnnnnnnnnnnnnnnnnnnnnnnnnnnnnnnnnnnnnnnnnnnnnnnnnnnnnnnnnnnnnnnnnnnnnnnnnnnnnnnnnnnnnnnnnnnnnnnnnnnnnnnnnnnnnnnnnnnnnnnnnnnnnnnnnnnnnnnnnnnnnnnnnnnnnnnnnnnnnnnnnnnnnnnnnnnnnnnnnnnnnnnnnnnnnnnnnnnnnnnnnnnnnnnnnnnnnnnnnnnnnnnnnnnnnnnnnnnnnnnnnnnnnnnnnnnnnnnnnnnnnnnnnnnnnnnnnnnnnnnnnnnnnnnnnnnnnnnnnnnnnnnnnnnnnnnnnnnnnnnnnnnnnnnnnnnnnnnnnnnnnnnnnnnnnnnnnnnnnnnnnnnnnnnnnnnnnnnnnnnnnnnnnnnnnnnnnnnnnnnnnnnnnnnnnnnnnnnnnnnnnnnnnnnnnnnnnnnnnnnnnnnnnnnnnnnnnnnnnnnnnnnnnnnnnnnnnnnnnnnnnnnnnnnnnnnnnnnnnnnnnnnnnnnnnnnnnnnnnnnnnnnnnnnnnnnnnnnnnnnnnnnnnnnnnnnnnnnnnnnnnnnnnnnnnnnnnnnnnnnnnnnnnnnnnnnnnnnnnnnnnnnnnnnnnnnnnnnnnnnnnnnnnnnnnnnnnnnnnnnnnnnnnnnnnnnnnnnnnnnnnnnnnnnnnnnnnnnnnnnnnnnnnnnnnnnnnnnnnnnnnnnnnnnnnnnnnnnnnnnnnnnnnnnnnnnnnnnnnnnnnnnnnnnnnnnnnnnnnnnnnnnnnnnnnnnnnnnnnnnnnnnnnnnnnnnnnnnnnnnnnnnnnnnnnnnnnnnnnnnnnnnnnnnnnnnnnnnnnnnnnnnnnnnnnnnnnnnnnnnnnnnnnnnnnnnnnnnnnnnnnnnnnnnnnnnnnnnnnnnnnnnnnnnnnnnnnnnnnnnnnnnnnnnnnnnnnnnnnnnnnnnnnnnnnnnnnnnnnnnnnnnnnnnnnnnnnnnnnnnnnnnnnnnnnnnnnnnnnnnnnnnnnnnnnnnnnnnnnnnnnnnnnnnnnnnnnnnnnnnnnnnnnnnnnnnnnnnnnnnnnnnnnnnnnnnnnnnnnnnnnnnnnnnnnnnnnnnnnnnnnnnnnnnnnnnnnnnnnnnnnnnnnnnnnnnnnnnnnnnnnnnnnnnnnnnnnnnnnnnnnnnnnnnnnnnnnnnnnnnnnnnnnnnnnnnnnnnnnnnnnnnnnnnnnnnnnnnnnnnnnnnnnnnnnnnnnnnnnnnnnnnnnnnnnnnnnnnnnnnnnnnnnnnnnnnnnnnnnnnnnnnnnnnnnnnnnnnnnnnnnnnnnnnnnnnnnnnnnnnnnnnnnnnnnnnnnnnnnnnnnnnnnnnnnnnnnnnnnnnnnnnnnnnnnnnnnnnnnnnnnnnnnnnnnnnnnnnnnnnnnnnnnnnnnnnnnnnnnnnnnnnnnnnnnnnnnnnnnnnnnnnnnnnnnnnnnnnnnnnnnnnnnnnnnnnnnnnnnnnnnnnnnnnnnnnnnnnnnnnnnnnnnnnnnnnnnnnnnnnnnnnnnnnnnnnnnnnnnnnnnnnnnnnnnnnnnnnnnnnnnnnnnnnnnnnnnnnnnnnnnnnnnnnnnnnnnnnnnnnnnnnnnnnnnnnnnnnnnnnnnnnnnnnnnnnnnnnnnnnnnnnnnnnnnnnnnnnnnnnnnnnnnnnnnnnnnnnnnnnnnnnnnnnnnnnnnnnnnnnnnnnnnnnnnnnnnnnnnnnnnnnnnnnnnnnnnnnnnnnnnnnnnnnnnnnnnnnnnnnnnnnnnnnnnnnnnnnnnnnnnnnnnnnnnnnnnnnnnnnnnnnnnnnnnnnnnnnnnnnnnnnnnnnnnnnnnnnnnnnnnnnnnnnnnnnnnnnnnnnnnnnnnnnnnnnnnnnnnnnnnnnnnnnnnnnnnnnnnnnnnnnnnnnnnnnnnnnnnnnnnnnnnnnnnnnnnnnnnnnnnnnnnnnnnnnnnnnnnnnnnnnnnnnnnnnnnnnnnnnnnnnnnnnnnnnnnnnnnnnnnnnnnnnnnnnnnnnnnnnnnnnnnnnnnnnnnnnnnnnnnnnnnnnnnnnnnnnnnnnnnnnnnnnnnnnnnnnnnnnnnnnnnnnnnnnnnnnnnnnnnnnnnnnnnnnnnnnnnnnnnnnnnnnnnnnnnnnnnnnnnnnnnnnnnnnnnnnnnnnnnnnnnnnnnnnnnnnnnnnnnnnnnnnnnnnnnnnnnnnnnnnnnnnnnnnnnnnnnnnnnnnnnnnnnnnnnnnnnnnnnnnnnnnnnnnnnnnnnnnnnnnnnnnnnnnnnnnnnnnnnnnnnnnnnnnnnnnnnnnnnnnnnnnnnnnnnnnnnnnnnnnnnnnnnnnnnnnnnnnnnnnnnnnnnnnnnnnnnnnnnnnnnnnnnnnnnnnnnnnnnnnnnnnnnnnnnnnnnnnnnnnnnnnnnnnnnnnnnnnnnnnnnnnnnnnnnnnnnnnnnnnnnnnnnnnnnnnnnnnnnnnnnnnnnnnnnnnnnnnnnnnnnnnnnnnnnnnnnnnnnnnnnnnnnnnnnnnnnnnnnnnnnnnnnnnnnnnnnnnnnnnnnnnnnnnnnnnnnnnnnnnnnnnnnnnnnnnnnnnnnnnnnnnnnnnnnnnnnnnnnnnnnnnnnnnnnnnnnnnnnnnnnnnnnnnnnnnnnnnnnnnnnnnnnnnnnnnnnnnnnnnnnnnnnnnnnnnnnnnnnnnnnnnnnnnnnnnnnnnnnnnnnnnnnnnnnnnnnnnnnnnnnnnnnnnnnnnnnnnnnnnnnnnnnnnnnnnnnnnnnnnnnnnnnnnnnnnnnnnnnnnnnnnnnnnnnnnnnnnnnnnnnnnnnnnnnnnnnnnnnnnnnnnnnnnnnnnnnnnnnnnnnnnnnnnnnnnnnnnnnnnnnnnnnnnnnnnnnnnnnnnnnnnnnnnnnnnnnnnnnnnnnnnnnnnnnnnnnnnnnnnnnnnnnnnnnnnnnnnnnnnnnnnnnnnnnnnnnnnnnnnnnnnnnnnnnnnnnnnnnnnnnnnnnnnnnnnnnnnnnnnnnnnnnnnnnnnnnnnnnnnnnnnnnnnnnnnnnnnnnnnnnnnnnnnnnnnnnnnnnnnnnnnnnnnnnnnnnnnnnnnnnnnnnnnnnnnnnnnnnnnnnnnnnnnnnnnnnnnnnnnnnnnnnnnnnnnnnnnnnnnnnnnnnnnnnnnnnnnnnnnnnnnnnnnnnnnnnnnnnnnnnnnnnnnnnnnnnnnnnnnnnnnnnnnnnnnnnnnnnnnnnnnnnnnnnnnnnnnnnnnnnnnnnnnnnnnnnnnnnnnnnnnnnnnnnnnnnnnnnnnnnnnnnnnnnnnnnnnnnnnnnnnnnnnnnnnnnnnnnnnnnnnnnnnnnnnnnnnnnnnnnnnnnnnnnnnnnnnnnnnnnnnnnnnnnnnnnnnnnnnnnnnnnnnnnnnnnnnnnnnnnnnnnnnnnnnnnnnnnnnnnnnnnnnnnnnnnnnnnnnnnnnnnnnnnnnnnnnnnnnnnnnnnnnnnnnnnnnnnnnnnnnnnnnnnnnnnnnnnnnnnnnnnnnnnnnnnnnnnnnnnnnnnnnnnnnnnnnnnnnnnnnnnnnnnnnnnnnnnnnnnnnnnnnnnnnnnnnnnnnnnnnnnnnnnnnnnnnnnnnnnnnnnnnnnnnnnnnnnnnnnnnnnnnnnnnnnnnnnnnnnnnnnnnnnnnnnnnnnnnnnnnnnnnnnnnnnnnnnnnnnnnnnnnnnnnnnnnnnnnnnnnnnnnnnnnnnnnnnnnnnnnnnnnnnnnnnnnnnnnnnnnnnnnnnnnnnnnnnnnnnnnnnnnnnnnnnnnnnnnnnnnnnnnnnnnnnnnnnnnnnnnnnnnnnnnnnnnnnnnnnnnnnnnnnnnnnnnnnnnnnnnnnnnnnnnnnnnnnnnnnnnnnnnnnnnnnnnnnnnnnnnnnnnnnnnnnnnnnnnnnnnnnnnnnnnnnnnnnnnnnnnnnnnnnnnnnnnnnnnnnnnnnnnnnnnnnnnnnnnnnnnnnnnnnnnnnnnnnnnnnnnnnnnnnnnnnnnnnnnnnnnnnnnnnnnnnnnnnnnnnnnnnnnnnnnnnnnnnnnnnnnnnnnnnnnnnnnnnnnnnnnnnnnnnnnnnnnnnnnnnnnnnnnnnnnnnnnnnnnnnnnnnnnnnnnnnnnnnnnnnnnnnnnnnnnnnnnnnnnnnnnnnnnnnnnnnnnnnnnnnnnnnnnnnnnnnnnnnnnnnnnnnnnnnnnnnnnnnnnnnnnnnnnnnnnnnnnnnnnnnnnnnnnnnnnnnnnnnnnnnnnnnnnnnnnnnnnnnnnnnnnnnnnnnnnnnnnnnnnnnnnnnnnnnnnnnnnnnnnnnnnnnnnnnnnnnnnnnnnnnnnnnnnnnnnnnnnnnnnnnnnnnnnnnnnnnnnnnnnnnnnnnnnnnnnnnnnnnnnnnnnnnnnnnnnnnnnnnnnnnnnnnnnnnnnnnnnnnnnnnnnnnnnnnnnnnnnnnnnnnnnnnnnnnnnnnnnnnnnnnnnnnnnnnnnnnnnnnnnnnnnnnnnnnnnnnnnnnnnnnnnnnnnnnnnnnnnnnnnnnnnnnnnnnnnnnnnnnnnnnnnnnnnnnnnnnnnnnnnnnnnnnnnnnnnnnnnnnnnnnnnnnnnnnnnnnnnnnnnnnnnnnnnnnnnnnnnnnnnnnnnnnnnnnnnnnnnnnnnnnnnnnnnnnnnnnnnnnnnnnnnnnnnnnnnnnnnnnnnnnnnnnnnnnnnnnnnnnnnnnnnnnnnnnnnnnnnnnnnnnnnnnnnnnnnnnnnnnnnnnnnnnnnnnnnnnnnnnnnnnnnnnnnnnnnnnnnnnnnnnnnnnnnnnnnnnnnnnnnnnnnnnnnnnnnnnnnnnnnnnnnnnnnnnnnnnnnnnnnnnnnnnnnnnnnnnnnnnnnnnnnnnnnnnnnnnnnnnnnnnnnnnnnnnnnnnnnnnnnnnnnnnnnnnnnnnnnnnnnnnnnnnnnnnnnnnnnnnnnnnnnnnnnnnnnnnnnnnnnnnnnnnnnnnnnnnnnnnnnnnnnnnnnnnnnnnnnnnnnnnnnnnnnnnnnnnnnnnnnnnnnnnnnnnnnnnnnnnnnnnnnnnnnnnnnnnnnnnnnnnnnnnnnnnnnnnnnnnnnnnnnnnnnnnnnnnnnnnnnnnnnnnnnnnnnnnnnnnnnnnnnnnnnnnnnnnnnnnnnnnnnnnnnnnnnnnnnnnnnnnnnnnnnnnnnnnnnnnnnnnnnnnnnnnnnnnnnnnnnnnnnnnnnnnnnnnnnnnnnnnnnnnnnnnnnnnnnnnnnnnnnnnnnnnnnnnnnnnnnnnnnnnnnnnnnnnnnnnnnnnnnnnnnnnnnnnnnnnnnnnnnnnnnnnnnnnnnnnnnnnnnnnnnnnnnnnnnnnnnnnnnnnnnnnnnnnnnnnnnnnnnnnnnnnnnnnnnnnnnnnnnnnnnnnnnnnnnnnnnnnnnnnnnnnnnnnnnnnnnnnnnnnnnnnnnnnnnnnnnnnnnnnnnnnnnnnnnnnnnnnnnnnnnnnnnnnnnnnnnnnnnnnnnnnnnnnnnnnnnnnnnnnnnnnnnnnnnnnnnnnnnnnnnnnnnnnnnnnnnnnnnnnnnnnnnnnnnnnnnnnnnnnnnnnnnnnnnnnnnnnnnnnnnnnnnnnnnnnnnnnnnnnnnnnnnnnnnnnnnnnnnnnnnnnnnnnnnnnnnnnnnnnnnnnnnnnnnnnnnnnnnnnnnnnnnnnnnnnnnnnnnnnnnnnnnnnnnnnnnnnnnnnnnnnnnnnnnnnnnnnnnnnnnnnnnnnnnnnnnnnnnnnnnnnnnnnnnnnnnnnnnnnnnnnnnnnnnnnnnnnnnnnnnnnnnnnnnnnnnnnnnnnnnnnnnnnnnnnnnnnnnnnnnnnnnnnnnnnnnnnnnnnnnnnnnnnnnnnnnnnnnnnnnnnnnnnnnnnnnnnnnnnnnnnnnnnnnnnnnnnnnnnnnnnnnnnnnnnnnnnnnnnnnnnnnnnnnnnnnnnnnnnnnnnnnnnnnnnnnnnnnnnnnnnnnnnnnnnnnnnnnnnnnnnnnnnnnnnnnnnnnnnnnnnnnnnnnnnnnnnnnnnnnnnnnnnnnnnnnnnnnnnnnnnnnnnnnnnnnnnnnnnnnnnnnnnnnnnnnnnnnnnnnnnnnnnnnnnnnnnnnnnnnnnnnnnnnnnnnnnnnnnnnnnnnnnnnnnnnnnnnnnnnnnnnnnnnnnnnnnnnnnnnnnnnnnnnnnnnnnnnnnnnnnnnnnnnnnnnnnnnnnnnnnnnnnnnnnnnnnnnnnnnnnnnnnnnnnnnnnnnnnnnnnnnnnnnnnnnnnnnnnnnnnnnnnnnnnnnnnnnnnnnnnnnnnnnnnnnnnnnnnnnnnnnnnnnnnnnnnnnnnnnnnnnnnnnnnnnnnnnnnnnnnnnnnnnnnnnnnnnnnnnnnnnnnnnnnnnnnnnnnnnnnnnnnnnnnnnnnnnnnnnnnnnnnnnnnnnnnnnnnnnnnnnnnnnnnnnnnnnnnnnnnnnnnnnnnnnnnnnnnnnnnnnnnnnnnnnnnnnnnnnnnnnnnnnnnnnnnnnnnnnnnnnnnnnnnnnnnnnnnnnnnnnnnnnnnnnnnnnnnnnnnnnnnnnnnnnnnnnnnnnnnnnnnnnnnnnnnnnnnnnnnnnnnnnnnnnnnnnnnnnnnnnnnnnnnnnnnnnnnnnnnnnnnnnnnnnnnnnnnnnnnnnnnnnnnnnnnnnnnnnnnnnnnnnnnnnnnnnnnnnnnnnnnnnnnnnnnnnnnnnnnnnnnnnnnnnnnnnnnnnnnnnnnnnnnnnnnnnnnnnnnnnnnnnnnnnnnnnnnnnnnnnnnnnnnnnnnnnnnnnnnnnnnnnnnnnnnnnnnnnnnnnnnnnnnnnnnnnnnnnnnnnnnnnnnnnnnnnnnnnnnnnnnnnnnnnnnnnnnnnnnnnnnnnnnnnnnnnnnnnnnnnnnnnnnnnnnnnnnnnnnnnnnnnnnnnnnnnnnnnnnnnnnnnnnnnnnnnnnnnnnnnnnnnnnnnnnnnnnnnnnnnnnnnnnnnnnnnnnnnnnnnnnnnnnnnnnnnnnnnnnnnnnnnnnnnnnnnnnnnnnnnnnnnnnnnnnnnnnnnnnnnnnnnnnnnnnnnnnnnnnnnnnnnnnnnnnnnnnnnnnnnnnnnnnnnnnnnnnnnnnnnnnnnnnnnnnnnnnnnnnnnnnnnnnnnnnnnnnnnnnnnnnnnnnnnnnnnnnnnnnnnnnnnnnnnnnnnnnnnnnnnnnnnnnnnnnnnnnnnnnnnnnnnnnnnnnnnnnnnnnnnnnnnnnnnnnnnnnnnnnnnnnnnnnnnnnnnnnnnnnnnnnnnnnnnnnnnnnnnnnnnnnnnnnnnnnnnnnnnnnnnnnnnnnnnnnnnnnnnnnnnnnnnnnnnnnnnnnnnnnnnnnnnnnnnnnnnnnnnnnnnnnnnnnnnnnnnnnnnnnnnnnnnnnnnnnnnnnnnnnnnnnnnnnnnnnnnnnnnnnnnnnnnnnnnnnnnnnnnnnnnnnnnnnnnnnnnnnnnnnnnnnnnnnnnnnnnnnnnnnnnnnnnnnnnnnnnnnnnnnnnnnnnnnnnnnnnnnnnnnnnnnnnnnnnnnnnnnnnnnnnnnnnnnnnnnnnnnnnnnnnnnnnnnnnnnnnnnnnnnnnnnnnnnnnnnnnnnnnnnnnnnnnnnnnnnnnnnnnnnnnnnnnnnnnnnnnnnnnnnnnnnnnnnnnnnnnnnnnnnnnnnnnnnnnnnnnnnnnnnnnnnnnnnnnnnnnnnnnnnnnnnnnnnnnnnnnnnnnnnnnnnnnnnnnnnnnnnnnnnnnnnnnnnnnnnnnnnnnnnnnnnnnnnnnnnnnnnnnnnnnnnnnnnnnnnnnnnnnnnnnnnnnnnnnnnnnnnnnnnnnnnnnnnnnnnnnnnnnnnnnnnnnnnnnnnnnnnnnnnnnnnnnnnnnnnnnnnnnnnnnnnnnnnnnnnnnnnnnnnnnnnnnnnnnnnnnnnnnnnnnnnnnnnnnnnnnnnnnnnnnnnnnnnnnnnnnnnnnnnnnnnnnnnnnnnnnnnnnnnnnnnnnnnnnnnnnnnnnnnnnnnnnnnnnnnnnnnnnnnnnnnnnnnnnnnnnnnnnnnnnnnnnnnnnnnnnnnnnnnnnnnnnnnnnnnnnnnnnnnnnnnnnnnnnnnnnnnnnnnnnnnnnnnnnnnnnnnnnnnnnnnnnnnnnnnnnnnnnnnnnnnnnnnnnnnnnnnnnnnnnnnnnnnnnnnnnnnnnnnnnnnnnnnnnnnnnnnnnnnnnnnnnnnnnnnnnnnnnnnnnnnnnnnnnnnnnnnnnnnnnnnnnnnnnnnnnnnnnnnnnnnnnnnnnnnnnnnnnnnnnnnnnnnnnnnnnnnnnnnnnnnnnnnnnnnnnnnnnnnnnnnnnnnnnnnnnnnnnnnnnnnnnnnnnnnnnnnnnnnnnnnnnnnnnnnnnnnnnnnnnnnnnnnnnnnnnnnnnnnnnnnnnnnnnnnnnnnnnnnnnnnnnnnnnnnnnnnnnnnnnnnnnnnnnnnnnnnnnnnnnnnnnnnnnnnnnnnnnnnnnnnnnnnnnnnnnnnnnnnnnnnnnnnnnnnnnnnnnnnnnnnnnnnnnnnnnnnnnnnnnnnnnnnnnnnnnnnnnnnnnnnnnnnnnnnnnnnnnnnnnnnnnnnnnnnnnnnnnnnnnnnnnnnnnnnnnnnnnnnnnnnnnnnnnnnnnnnnnnnnnnnnnnnnnnnnnnnnnnnnnnnnnnnnnnnnnnnnnnnnnnnnnnnnnnnnnnnnnnnnnnnnnnnnnnnnnnnnnnnnnnnnnnnnnnnnnnnnnnnnnnnnnnnnnnnnnnnnnnnnnnnnnnnnnnnnnnnnnnnnnnnnnnnnnnnnnnnnnnnnnnnnnnnnnnnnnnnnnnnnnnnnnnnnnnnnnnnnnnnnnnnnnnnnnnnnnnnnnnnnnnnnnnnnnnnnnnnnnnnnnnnnnnnnnnnnnnnnnnnnnnnnnnnnnnnnnnnnnnnnnnnnnnnnnnnnnnnnnnnnnnnnnnnnnnnnnnnnnnnnnnnnnnnnnnnnnnnnnnnnnnnnnnnnnnnnnnnnnnnnnnnnnnnnnnnnnnnnnnnnnnnnnnnnnnnnnnnnnnnnnnnnnnnnnnnnnnnnnnnnnnnnnnnnnnnnnnnnnnnnnnnnnnnnnnnnnnnnnnnnnnnnnnnnnnnnnnnnnnnnnnnnnnnnnnnnnnnnnnnnnnnnnnnnnnnnnnnnnnnnnnnnnnnnnnnnnnnnnnnnnnnnnnnnnnnnnnnnnnnnnnnnnnnnnnnnnnnnnnnnnnnnnnnnnnnnnnnnnnnnnnnnnnnnnnnnnnnnnnnnnnnnnnnnnnnnnnnnnnnnnnnnnnnnnnnnnnnnnnnnnnnnnnnnnnnnnnnnnnnnnnnnnnnnnnnnnnnnnnnnnnnnnnnnnnnnnnnnnnnnnnnnnnnnnnnnnnnnnnnnnnnnnnnnnnnnnnnnnnnnnnnnnnnnnnnnnnnnnnnnnnnnnnnnnnnnnnnnnnnnnnnnnnnnnnnnnnnnnnnnnnnnnnnnnnnnnnnnnnnnnnnnnnnnnnnnnnnnnnnnnnnnnnnnnnnnnnnnnnnnnnnnnnnnnnnnnnnnnnnnnnnnnnnnnnnnnnnnnnnnnnnnnnnnnnnnnnnnnnnnnnnnnnnnnnnnnnnnnnnnnnnnnnnnnnnnnnnnnnnnnnnnnnnnnnnnnnnnnnnnnnnnnnnnnnnnnnnnnnnnnnnnnnnnnnnnnnnnnnnnnnnnnnnnnnnnnnnnnnnnnnnnnnnnnnnnnnnnnnnnnnnnnnnnnnnnnnnnnnnnnnnnnnnnnnnnnnnnnnnnnnnnnnnnnnnnnnnnnnnnnnnnnnnnnnnnnnnnnnnnnnnnnnnnnnnnnnnnnnnnnnnnnnnnnnnnnnnnnnnnnnnnnnnnnnnnnnnnnnnnnnnnnnnnnnnnnnnnnnnnnnnnnnnnnnnnnnnnnnnnnnnnnnnnnnnnnnnnnnnnnnnnnnnnnnnnnnnnnnnnnnnnnnnnnnnnnnnnnnnnnnnnnnnnnnnnnnnnnnnnnnnnnnnnnnnnnnnnnnnnnnnnnnnnnnnnnnnnnnnnnnnnnnnnnnnnnnnnnnnnnnnnnnnnnnnnnnnnnnnnnnnnnnnnnnnnnnnnnnnnnnnnnnnnnnnnnnnnnnnnnnnnnnnnnnnnnnnnnnnnnnnnnnnnnnnnnnnnnnnnnnnnnnnnnnnnnnnnnnnnnnnnnnnnnnnnnnnnnnnnnnnnnnnnnnnnnnnnnnnnnnnnnnnnnnnnnnnnnnnnnnnnnnnnnnnnnnnnnnnnnnnnnnnnnnnnnnnnnnnnnnnnnnnnnnnnnnnnnnnnnnnnnnnnnnnnnnnnnnnnnnnnnnnnnnnnnnnnnnnnnnnnnnnnnnnnnnnnnnnnnnnnnnnnnnnnnnnnnnnnnnnnnnnnnnnnnnnnnnnnnnnnnnnnnnnnnnnnnnnnnnnnnnnnnnnnnnnnnnnnnnnnnnnnnnnnnnnnnnnnnnnnnnnnnnnnnnnnnnnnnnnnnnnnnnnnnnnnnnnnnnnnnnnnnnnnnnnnnnnnnnnnnnnnnnnnnnnnnnnnnnnnnnnnnnnnnnnnnnnnnnnnnnnnnnnnnnnnnnnnnnnnnnnnnnnnnnnnnnnnnnnnnnnnnnnnnnnnnnnnnnnnnnnnnnnnnnnnnnnnnnnnnnnnnnnnnnnnnnnnnnnnnnnnnnnnnnnnnnnnnnnnnnnnnnnnnnnnnnnnnnnnnnnnnnnnnnnnnnnnnnnnnnnnnnnnnnnnnnnnnnnnnnnnnnnnnnnnnnnnnnnnnnnnnnnnnnnnnnnnnnnnnnnnnnnnnnnnnnnnnnnnnnnnnnnnnnnnnnnnnnnnnnnnnnnnnnnnnnnnnnnnnnnnnnnnnnnnnnnnnnnnnnnnnnnnnnnnnnnnnnnnnnnnnnnnnnnnnnnnnnnnnnnnnnnnnnnnnnnnnnnnnnnnnnnnnnnnnnnnnnnnnnnnnnnnnnnnnnnnnnnnnnnnnnnnnnnnnnnnnnnnnnnnnnnnnnnnnnnnnnnnnnnnnnnnnnnnnnnnnnnnnnnnnnnnnnnnnnnnnnnnnnnnnnnnnnnnnnnnnnnnnnnnnnnnnnnnnnnnnnnnnnnnnnnnnnnnnnnnnnnnnnnnnnnnnnnnnnnnnnnnnnnnnnnnnnnnnnnnnnnnnnnnnnnnnnnnnnnnnnnnnnnnnnnnnnnnnnnnnnnnnnnnnnnnnnnnnnnnnnnnnnnnnnnnnnnnnnnnnnnnnnnnnnnnnnnnnnnnnnnnnnnnnnnnnnnnnnnnnnnnnnnnnnnnnnnnnnnnnnnnnnnnnnnnnnnnnnnnnnnnnnnnnnnnnnnnnnnnnnnnnnnnnnnnnnnnnnnnnnnnnnnnnnnnnnnnnnnnnnnnnnnnnnnnnnnnnnnnnnnnnnnnnnnnnnnnnnnnnnnnnnnnnnnnnnnnnnnnnnnnnnnnnnnnnnnnnnnnnnnnnnnnnnnnnnnnnnnnnnnnnnnnnnnnnnnnnnnnnnnnnnnnnnnnnnnnnnnnnnnnnnnnnnnnnnnnnnnnnnnnnnnnnnnnnnnnnnnnnnnnnnnnnnnnnnnnnnnnnnnnnnnnnnnnnnnnnnnnnnnnnnnnnnnnnnnnnnnnnnnnnnnnnnnnnnnnnnnnnnnnnnnnnnnnnnnnnnnnnnnnnnnnnnnnnnnnnnnnnnnnnnnnnnnnnnnnnnnnnnnnnnnnnnnnnnnnnnnnnnnnnnnnnnnnnnnnnnnnnnnnnnnnnnnnnnnnnnnnnnnnnnnnnnnnnnnnnnnnnnnnnnnnnnnnnnnnnnnnnnnnnnnnnnnnnnnnnnnnnnnnnnnnnnnnnnnnnnnnnnnnnnnnnnnnnnnnnnnnnnnnnnnnnnnnnnnnnnnnnnnnnnnnnnnnnnnnnnnnnnnnnnnnnnnnnnnnnnnnnnnnnnnnnnnnnnnnnnnnnnnnnnnnnnnnnnnnnnnnnnnnnnnnnnnnnnnnnnnnnnnnnnnnnnnnnnnnnnnnnnnnnnnnnnnnnnnnnnnnnnnnnnnnnnnnnnnnnnnnnnnnnnnnnnnnnnnnnnnnnnnnnnnnnnnnnnnnnnnnnnnnnnnnnnnnnnnnnnnnnnnnnnnnnnnnnnnnnnnnnnnnnnnnnnnnnnnnnnnnnnnnnnnnnnnnnnnnnnnnnnnnnnnnnnnnnnnnnnnnnnnnnnnnnnnnnnnnnnnnnnnnnnnnnnnnnnnnnnnnnnnnnnnnnnnnnnnnnnnnnnnnnnnnnnnnnnnnnnnnnnnnnnnnnnnnnnnnnnnnnnnnnnnnnnnnnnnnnnnnnnnnnnnnnnnnnnnnnnnnnnnnnnnnnnnnnnnnnnnnnnnnnnnnnnnnnnnnnnnnnnnnnnnnnnnnnnnnnnnnnnnnnnnnnnnnnnnnnnnnnnnnnnnnnnnnnnnnnnnnnnnnnnnnnnnnnnnnnnnnnnnnnnnnnnnnnnnnnnnnnnnnnnnnnnnnnnnnnnnnnnnnnnnnnnnnnnnnnnnnnnnnnnnnnnnnnnnnnnnnnnnnnnnnnnnnnnnnnnnnnnnnnnnnnnnnnnnnnnnnnnnnnnnnnnnnnnnnnnnnnnnnnnnnnnnnnnnnnnnnnnnnnnnnnnnnnnnnnnnnnnnnnnnnnnnnnnnnnnnnnnnnnnnnnnnnnnnnnnnnnnnnnnnnnnnnnnnnnnnnnnnnnnnnnnnnnnnnnnnnnnnnnnnnnnnnnnnnnnnnnnnnnnnnnnnnnnnnnnnnnnnnnnnnnnnnnnnnnnnnnnnnnnnnnnnnnnnnnnnnnnnnnnnnnnnnnnnnnnnnnnnnnnnnnnnnnnnnnnnnnnnnnnnnnnnnnnnnnnnnnnnnnnnnnnnnnnnnnnnnnnnnnnnnnnnnnnnnnnnnnnnnnnnnnnnnnnnnnnnnnnnnnnnnnnnnnnnnnnnnnnnnnnnnnnnnnnnnnnnnnnnnnnnnnnnnnnnnnnnnnnnnnnnnnnnnnnnnnnnnnnnnnnnnnnnnnnnnnnnnnnnnnnnnnnnnnnnnnnnnnnnnnnnnnnnnnnnnnnnnnnnnnnnnnnnnnnnnnnnnnnnnnnnnnnnnnnnnnnnnnnnnnnnnnnnnnnnnnnnnnnnnnnnnnnnnnnnnnnnnnnnnnnnnnnnnnnnnnnnnnnnnnnnnnnnnnnnnnnnnnnnnnnnnnnnnnnnnnnnnnnnnnnnnnnnnnnnnnnnnnnnnnnnnnnnnnnnnnnnnnnnnnnnnnnnnnnnnnnnnnnnnnnnnnnnnnnnnnnnnnnnnnnnnnnnnnnnnnnnnnnnnnnnnnnnnnnnnnnnnnnnnnnnnnnnnnnnnnnnnnnnnnnnnnnnnnnnnnnnnnnnnnnnnnnnnnnnnnnnnnnnnnnnnnnnnnnnnnnnnnnnnnnnnnnnnnnnnnnnnnnnnnnnnnnnnnnnnnnnnnnnnnnnnnnnnnnnnnnnnnnnnnnnnnnnnnnnnnnnnnnnnnnnnnnnnnnnnnnnnnnnnnnnnnnnnnnnnnnnnnnnnnnnnnnnnnnnnnnnnnnnnnnnnnnnnnnnnnnnnnnnnnnnnnnnnnnnnnnnnnnnnnnnnnnnnnnnnnnnnnnnnnnnnnnnnnnnnnnnnnnnnnnnnnnnnnnnnnnnnnnnnnnnnnnnnnnnnnnnnnnnnnnnnnnnnnnnnnnnnnnnnnnnnnnnnnnnnnnnnnnnnnnnnnnnnnnnnnnnnnnnnnnnnnnnnnnnnnnnnnnnnnnnnnnnnnnnnnnnnnnnnnnnnnnnnnnnnnnnnnnnnnnnnnnnnnnnnnnnnnnnnnnnnnnnnnnnnnnnnnnnnnnnnnnnnnnnnnnnnnnnnnnnnnnnnnnnnnnnnnnnnnnnnnnnnnnnnnnnnnnnnnnnnnnnnnnnnnnnnnnnnnnnnnnnnnnnnnnnnnnnnnnnnnnnnnnnnnnnnnnnnnnnnnnnnnnnnnnnnnnnnnnnnnnnnnnnnnnnnnnnnnnnnnnnnnnnnnnnnnnnnnnnnnnnnnnnnnnnnnnnnnnnnnnnnnnnnnnnnnnnnnnnnnnnnnnnnnnnnnnnnnnnnnnnnnnnnnnnnnnnnnnnnnnnnnnnnnnnnnnnnnnnnnnnnnnnnnnnnnnnnnnnnnnnnnnnnnnnnnnnnnnnnnnnnnnnnnnnnnnnnnnnnnnnnnnnnnnnnnnnnnnnnnnnnnnnnnnnnnnnnnnnnnnnnnnnnnnnnnnnnnnnnnnnnnnnnnnnnnnnnnnnnnnnnnnnnnnnnnnnnnnnnnnnnnnnnnnnnnnnnnnnnnnnnnnnnnnnnnnnnnnnnnnnnnnnnnnnnnnnnnnnnnnnnnnnnnnnnnnnnnnnnnnnnnnnnnnnnnnnnnnnnnnnnnnnnnnnnnnnnnnnnnnnnnnnnnnnnnnnnnnnnnnnnnnnnnnnnnnnnnnnnnnnnnnnnnnnnnnnnnnnnnnnnnnnnnnnnnnnnnnnnnnnnnnnnnnnnnnnnnnnnnnnnnnnnnnnnnnnnnnnnnnnnnnnnnnnnnnnnnnnnnnnnnnnnnnnnnnnnnnnnnnnnnnnnnnnnnnnnnnnnnnnnnnnnnnnnnnnnnnnnnnnnnnnnnnnnnnnnnnnnnnnnnnnnnnnnnnnnnnnnnnnnnnnnnnnnnnnnnnnnnnnnnnnnnnnnnnnnnnnnnnnnnnnnnnnnnnnnnnnnnnnnnnnnnnnnnnnnnnnnnnnnnnnnnnnnnnnnnnnnnnnnnnnnnnnnnnnnnnnnnnnnnnnnnnnnnnnnnnnnnnnnnnnnnnnnnnnnnnnnnnnnnnnnnnnnnnnnnnnnnnnnnnnnnnnnnnnnnnnnnnnnnnnnnnnnnnnnnnnnnnnnnnnnnnnnnnnnnnnnnnnnnnnnnnnnnnnnnnnnnnnnnnnnnnnnnnnnnnnnnnnnnnnnnnnnnnnnnnnnnnnnnnnnnnnnnnnnnnnnnnnnnnnnnnnnnnnnnnnnnnnnnnnnnnnnnnnnnnnnnnnnnnnnnnnnnnnnnnnnnnnnnnnnnnnnnnnnnnnnnnnnnnnnnnnnnnnnnnnnnnnnnnnnnnnnnnnnnnnnnnnnnnnnnnnnnnnnnnnnnnnnnnnnnnnnnnnnnnnnnnnnnnnnnnnnnnnnnnnnnnnnnnnnnnnnnnnnnnnnnnnnnnnnnnnnnnnnnnnnnnnnnnnnnnnnnnnnnnnnnnnnnnnnnnnnnnnnnnnnnnnnnnnnnnnnnnnnnnnnnnnnnnnnnnnnnnnnnnnnnnnnnnnnnnnnnnnnnnnnnnnnnnnnnnnnnnnnnnnnnnnnnnnnnnnnnnnnnnnnnnnnnnnnnnnnnnnnnnnnnnnnnnnnnnnnnnnnnnnnnnnnnnnnnnnnnnnnnnnnnnnnnnnnnnnnnnnnnnnnnnnnnnnnnnnnnnnnnnnnnnnnnnnnnnnnnnnnnnnnnnnnnnnnnnnnnnnnnnnnnnnnnnnnnnnnnnnnnnnnnnnnnnnnnnnnnnnnnnnnnnnnnnnnnnnnnnnnnnnnnnnnnnnnnnnnnnnnnnnnnnnnnnnnnnnnnnnnnnnnnnnnnnnnnnnnnnnnnnnnnnnnnnnnnnnnnnnnnnnnnnnnnnnnnnnnnnnnnnnnnnnnnnnnnnnnnnnnnnnnnnnnnnnnnnnnnnnnnnnnnnnnnnnnnnnnnnnnnnnnnnnnnnnnnnnnnnnnnnnnnnnnnnnnnnnnnnnnnnnnnnnnnnnnnnnnnnnnnnnnnnnnnnnnnnnnnnnnnnnnnnnnnnnnnnnnnnnnnnnnnnnnnnnnnnnnnnnnnnnnnnnnnnnnnnnnnnnnnnnnnnnnnnnnnnnnnnnnnnnnnnnnnnnnnnnnnnnnnnnnnnnnnnnnnnnnnnnnnnnnnnnnnnnnnnnnnnnnnnnnnnnnnnnnnnnnnnnnnnnnnnnnnnnnnnnnnnnnnnnnnnnnnnnnnnnnnnnnnnnnnnnnnnnnnnnnnnnnnnnnnnnnnnnnnnnnnnnnnnnnnnnnnnnnnnnnnnnnnnnnnnnnnnnnnnnnnnnnnnnnnnnnnnnnnnnnnnnnnnnnnnnnnnnnnnnnnnnnnnnnnnnnnnnnnnnnnnnnnnnnnnnnnnnnnnnnnnnnnnnnnnnnnnnnnnnnnnnnnnnnnnnnnnnnnnnnnnnnnnnnnnnnnnnnnnnnnnnnnnnnnnnnnnnnnnnnnnnnnnnnnnnnnnnnnnnnnnnnnnnnnnnnnnnnnnnnnnnnnnnnnnnnnnnnnnnnnnnnnnnnnnnnnnnnnnnnnnnnnnnnnnnnnnnnnnnnnnnnnnnnnnnnnnnnnnnnnnnnnnnnnnnnnnnnnnnnnnnnnnnnnnnnnnnnnnnnnnnnnnnnnnnnnnnnnnnnnnnnnnnnnnnnnnnnnnnnnnnnnnnnnnnnnnnnnnnnnnnnnnnnnnnnnnnnnnnnnnnnnnnnnnnnnnnnnnnnnnnnnnnnnnnnnnnnnnnnnnnnnnnnnnnnnnnnnnnnnnnnnnnnnnnnnnnnnnnnnnnnnnnnnnnnnnnnnnnnnnnnnnnnnnnnnnnnnnnnnnnnnnnnnnnnnnnnnnnnnnnnnnnnnnnnnnnnnnnnnnnnnnnnnnnnnnnnnnnnnnnnnnnnnnnnnnnnnnnnnnnnnnnnnnnnnnnnnnnnnnnnnnnnnnnnnnnnnnnnnnnnnnnnnnnnnnnnnnnnnnnnnnnnnnnnnnnnnnnnnnnnnnnnnnnnnnnnnnnnnnnnnnnnnnnnnnnnnnnnnnnnnnnnnnnnnnnnnnnnnnnnnnnnnnnnnnnnnnnnnnnnnnnnnnnnnnnnnnnnnnnnnnnnnnnnnnnnnnnnnnnnnnnnnnnnnnnnnnnnnnnnnnnnnnnnnnnnnnnnnnnnnnnnnnnnnnnnnnnnnnnnnnnnnnnnnnnnnnnnnnnnnnnnnnnnnnnnnnnnnnnnnnnnnnnnnnnnnnnnnnnnnnnnnnnnnnnnnnnnnnnnnnnnnnnnnnnnnnnnnnnnnnnnnnnnnnnnnnnnnnnnnnnnnnnnnnnnnnnnnnnnnnnnnnnnnnnnnnnnnnnnnnnnnnnnnnnnnnnnnnnnnnnnnnnnnnnnnnnnnnnnnnnnnnnnnnnnnnnnnnnnnnnnnnnnnnnnnnnnnnnnnnnnnnnnnnnnnnnnnnnnnnnnnnnnnnnnnnnnnnnnnnnnnnnnnnnnnnnnnnnnnnnnnnnnnnnnnnnnnnnnnnnnnnnnnnnnnnnnnnnnnnnnnnnnnnnnnnnnnnnnnnnnnnnnnnnnnnnnnnnnnnnnnnnnnnnnnnnnnnnnnnnnnnnnnnnnnnnnnnnnnnnnnnnnnnnnnnnnnnnnnnnnnnnnnnnnnnnnnnnnnnnnnnnnnnnnnnnnnnnnnnnnnnnnnnnnnnnnnnnnnnnnnnnnnnnnnnnnnnnnnnnnnnnnnnnnnnnnnnnnnnnnnnnnnnnnnnnnnnnnnnnnnnnnnnnnnnnnnnnnnnnnnnnnnnnnnnnnnnnnnnnnnnnnnnnnnnnnnnnnnnnnnnnnnnnnnnnnnnnnnnnnnnnnnnnnnnnnnnnnnnnnnnnnnnnnnnnnnnnnnnnnnnnnnnnnnnnnnnnnnnnnnnnnnnnnnnnnnnnnnnnnnnnnnnnnnnnnnnnnnnnnnnnnnnnnnnnnnnnnnnnnnnnnnnnnnnnnnnnnnnnnnnnnnnnnnnnnnnnnnnnnnnnnnnnnnnnnnnnnnnnnnnnnnnnnnnnnnnnnnnnnnnnnnnnnnnnnnnnnnnnnnnnnnnnnnnnnnnnnnnnnnnnnnnnnnnnnnnnnnnnnnnnnnnnnnnnnnnnnnnnnnnnnnnnnnnnnnnnnnnnnnnnnnnnnnnnnnnnnnnnnnnnnnnnnnnnnnnnnnnnnnnnnnnnnnnnnnnnnnnnnnnnnnnnnnnnnnnnnnnnnnnnnnnnnnnnnnnnnnnnnnnnnnnnnnnnnnnnnnnnnnnnnnnnnnnnnnnnnnnnnnnnnnnnnnnnnnnnnnnnnnnnnnnnnnnnnnnnnnnnnnnnnnnnnnnnnnnnnnnnnnnnnnnnnnnnnnnnnnnnnnnnnnnnnnnnnnnnnnnnnnnnnnnnnnnnnnnnnnnnnnnnnnnnnnnnnnnnnnnnnnnnnnnnnnnnnnnnnnnnnnnnnnnnnnnnnnnnnnnnnnnnnnnnnnnnnnnnnnnnnnnnnnnnnnnnnnnnnnnnnnnnnnnnnnnnnnnnnnnnnnnnnnnnnnnnnnnnnnnnnnnnnnnnnnnnnnnnnnnnnnnnnnnnnnnnnnnnnnnnnnnnnnnnnnnnnnnnnnnnnnnnnnnnnnnnnnnnnnnnnnnnnnnnnnnnnnnnnnnnnnnnnnnnnnnnnnnnnnnnnnnnnnnnnnnnnnnnnnnnnnnnnnnnnnnnnnnnnnnnnnnnnnnnnnnnnnnnnnnnnnnnnnnnnnnnnnnnnnnnnnnnnnnnnnnnnnnnnnnnnnnnnnnnnnnnnnnnnnnnnnnnnnnnnnnnnnnnnnnnnnnnnnnnnnnnnnnnnnnnnnnnnnnnnnnnnnnnnnnnnnnnnnnnnnnnnnnnnnnnnnnnnnnnnnnnnnnnnnnnnnnnnnnnnnnnnnnnnnnnnnnnnnnnnnnnnnnnnnnnnnnnnnnnnnnnnnnnnnnnnnnnnnnnnnnnnnnnnnnnnnnnnnnnnnnnnnnnnnnnnnnnnnnnnnnnnnnnnnnnnnnnnnnnnnnnnnnnnnnnnnnnnnnnnnnnnnnnnnnnnnnnnnnnnnnnnnnnnnnnnnnnnnnnnnnnnnnnnnnnnnnnnnnnnnnnnnnnnnnnnnnnnnnnnnnnnnnnnnnnnnnnnnnnnnnnnnnnnnnnnnnnnnnnnnnnnnnnnnnnnnnnnnnnnnnnnnnnnnnnnnnnnnnnnnnnnnnnnnnnnnnnnnnnnnnnnnnnnnnnnnnnnnnnnnnnnnnnnnnnnnnnnnnnnnnnnnnnnnnnnnnnnnnnnnnnnnnnnnnnnnnnnnnnnnnnnnnnnnnnnnnnnnnnnnnnnnnnnnnnnnnnnnnnnnnnnnnnnnnnnnnnnnnnnnnnnnnnnnnnnnnnnnnnnnnnnnnnnnnnnnnnnnnnnnnnnnnnnnnnnnnnnnnnnnnnnnnnnnnnnnnnnnnnnnnnnnnnnnnnnnnnnnnnnnnnnnnnnnnnnnnnnnnnnnnnnnnnnnnnnnnnnnnnnnnnnnnnnnnnnnnnnnnnnnnnnnnnnnnnnnnnnnnnnnnnnnnnnnnnnnnnnnnnnnnnnnnnnnnnnnnnnnnnnnnnnnnnnnnnnnnnnnnnnnnnnnnnnnnnnnnnnnnnnnnnnnnnnnnnnnnnnnnnnnnnnnnnnnnnnnnnnnnnnnnnnnnnnnnnnnnnnnnnnnnnnnnnnnnnnnnnnnnnnnnnnnnnnnnnnnnnnnnnnnnnnnnnnnnnnnnnnnnnnnnnnnnnnnnnnnnnnnnnnnnnnnnnnnnnnnnnnnnnnnnnnnnnnnnnnnnnnnnnnnnnnnnnnnnnnnnnnnnnnnnnnnnnnnnnnnnnnnnnnnnnnnnnnnnnnnnnnnnnnnnnnnnnnnnnnnnnnnnnnnnnnnnnnnnnnnnnnnnnnnnnnnnnnnnnnnnnnnnnnnnnnnnnnnnnnnnnnnnnnnnnnnnnnnnnnnnnnnnnnnnnnnnnnnnnnnnnnnnnnnnnnnnnnnnnnnnnnnnnnnnnnnnnnnnnnnnnnnnnnnnnnnnnnnnnnnnnnnnnnnnnnnnnnnnnnnnnnnnnnnnnnnnnnnnnnnnnnnnnnnnnnnnnnnnnnnnnnnnnnnnnnnnnnnnnnnnnnnnnnnnnnnnnnnnnnnnnnnnnnnnnnnnnnnnnnnnnnnnnnnnnnnnnnnnnnnnnnnnnnnnnnnnnnnnnnnnnnnnnnnnnnnnnnnnnnnnnnnnnnnnnnnnnnnnnnnnnnnnnnnnnnnnnnnnnnnnnnnnnnnnnnnnnnnnnnnnnnnnnnnnnnnnnnnnnnnnnnnnnnnnnnnnnnnnnnnnnnnnnnnnnnnnnnnnnnnnnnnnnnnnnnnnnnnnnnnnnnnnnnnnnnnnnnnnnnnnnnnnnnnnnnnnnnnnnnnnnnnnnnnnnnnnnnnnnnnnnnnnnnnnnnnnnnnnnnnnnnnnnnnnnnnnnnnnnnnnnnnnnnnnnnnnnnnnnnnnnnnnnnnnnnnnnnnnnnnnnnnnnnnnnnnnnnnnnnnnnnnnnnnnnnnnnnnnnnnnnnnnnnnnnnnnnnnnnnnnnnnnnnnnnnnnnnnnnnnnnnnnnnnnnnnnnnnnnnnnnnnnnnnnnnnnnnnnnnnnnnnnnnnnnnnnnnnnnnnnnnnnnnnnnnnnnnnnnnnnnnnnnnnnnnnnnnnnnnnnnnnnnnnnnnnnnnnnnnnnnnnnnnnnnnnnnnnnnnnnnnnnnnnnnnnnnnnnnnnnnnnnnnnnnnnnnnnnnnnnnnnnnnnnnnnnnnnnnnnnnnnnnnnnnnnnnnnnnnnnnnnnnnnnnnnnnnnnnnnnnnnnnnnnnnnnnnnnnnnnnnnnnnnnnnnnnnnnnnnnnnnnnnnnnnnnnnnnnnnnnnnnnnnnnnnnnnnnnnnnnnnnnnnnnnnnnnnnnnnnnnnnnnnnnnnnnnnnnnnnnnnnnnnnnnnnnnnnnnnnnnnnnnnnnnnnnnnnnnnnnnnnnnnnnnnnnnnnnnnnnnnnnnnnnnnnnnnnnnnnnnnnnnnnnnnnnnnnnnnnnnnnnnnnnnnnnnnnnnnnnnnnnnnnnnnnnnnnnnnnnnnnnnnnnnnnnnnnnnnnnnnnnnnnnnnnnnnnnnnnnnnnnnnnnnnnnnnnnnnnnnnnnnnnnnnnnnnnnnnnnnnnnnnnnnnnnnnnnnnnnnnnnnnnnnnnnnnnnnnnnnnnnnnnnnnnnnnnnnnnnnnnnnnnnnnnnnnnnnnnnnnnnnnnnnnnnnnnnnnnnnnnnnnnnnnnnnnnnnnnnnnnnnnnnnnnnnnnnnnnnnnnnnnnnnnnnnnnnnnnnnnnnnnnnnnnnnnnnnnnnnnnnnnnnnnnnnnnnnnnnnnnnnnnnnnnnnnnnnnnnnnnnnnnnnnnnnnnnnnnnnnnnnnnnnnnnnnnnnnnnnnnnnnnnnnnnnnnnnnnnnnnnnnnnnnnnnnnnnnnnnnnnnnnnnnnnnnnnnnnnnnnnnnnnnnnnnnnnnnnnnnnnnnnnnnnnnnnnnnnnnnnnnnnnnnnnnnnnnnnnnnnnnnnnnnnnnnnnnnnnnnnnnnnnnnnnnnnnnnnnnnnnnnnnnnnnnnnnnnnnnnnnnnnnnnnnnnnnnnnnnnnnnnnnnnnnnnnnnnnnnnnnnnnnnnnnnnnnnnnnnnnnnnnnnnnnnnnnnnnnnnnnnnnnnnnnnnnnnnnnnnnnnnnnnnnnnnnnnnnnnnnnnnnnnnnnnnnnnnnnnnnnnnnnnnnnnnnnnnnnnnnnnnnnnnnnnnnnnnnnnnnnnnnnnnnnnnnnnnnnnnnnnnnnnnnnnnnnnnnnnnnnnnnnnnnnnnnnnnnnnnnnnnnnnnnnnnnnnnnnnnnnnnnnnnnnnnnnnnnnnnnnnnnnnnnnnnnnnnnnnnnnnnnnnnnnnnnnnnnnnnnnnnnnnnnnnnnnnnnnnnnnnnnnnnnnnnnnnnnnnnnnnnnnnnnnnnnnnnnnnnnnnnnnnnnnnnnnnnnnnnnnnnnnnnnnnnnnnnnnnnnnnnnnnnnnnnnnnnnnnnnnnnnnnnnnnnnnnnnnnnnnnnnnnnnnnnnnnnnnnnnnnnnnnnnnnnnnnnnnnnnnnnnnnnnnnnnnnnnnnnnnnnnnnnnnnnnnnnnnnnnnnnnnnnnnnnnnnnnnnnnnnnnnnnnnnnnnnnnnnnnnnnnnnnnnnnnnnnnnnnnnnnnnnnnnnnnnnnnnnnnnnnnnnnnnnnnnnnnnnnnnnnnnnnnnnnnnnnnnnnnnnnnnnnnnnnnnnnnnnnnnnnnnnnnnnnnnnnnnnnnnnnnnnnnnnnnnnnnnnnnnnnnnnnnnnnnnnnnnnnnnnnnnnnnnnnnnnnnnnnnnnnnnnnnnnnnnnnnnnnnnnnnnnnnnnnnnnnnnnnnnnnnnnnnnnnnnnnnnnnnnnnnnnnnnnnnnnnnnnnnnnnnnnnnnnnnnnnnnnnnnnnnnnnnnnnnnnnnnnnnnnnnnnnnnnnnnnnnnnnnnnnnnnnnnnnnnnnnnnnnnnnnnnnnnnnnnnnnnnnnnnnnnnnnnnnnnnnnnnnnnnnnnnnnnnnnnnnnnnnnnnnnnnnnnnnnnnnnnnnnnnnnnnnnnnnnnnnnnnnnnnnnnnnnnnnnnnnnnnnnnnnnnnnnnnnnnnnnnnnnnnnnnnnnnnnnnnnnnnnnnnnnnnnnnnnnnnnnnnnnnnnnnnnnnnnnnnnnnnnnnnnnnnnnnnnnnnnnnnnnnnnnnnnnnnnnnnnnnnnnnnnnnnnnnnnnnnnnnnnnnnnnnnnnnnnnnnnnnnnnnnnnnnnnnnnnnnnnnnnnnnnnnnnnnnnnnnnnnnnnnnnnnnnnnnnnnnnnnnnnnnnnnnnnnnnnnnnnnnnnnnnnnnnnnnnnnnnnnnnnnnnnnnnnnnnnnnnnnnnnnnnnnnnnnnnnnnnnnnnnnnnnnnnnnnnnnnnnnnnnnnnnnnnnnnnnnnnnnnnnnnnnnnnnnnnnnnnnnnnnnnnnnnnnnnnnnnnnnnnnnnnnnnnnnnnnnnnnnnnnnnnnnnnnnnnnnnnnnnnnnnnnnnnnnnnnnnnnnnnnnnnnnnnnnnnnnnnnnnnnnnnnnnnnnnnnnnnnnnnnnnnnnnnnnnnnnnnnnnnnnnnnnnnnnnnnnnnnnnnnnnnnnnnnnnnnnnnnnnnnnnnnnnnnnnnnnnnnnnnnnnnnnnnnnnnnnnnnnnnnnnnnnnnnnnnnnnnnnnnnnnnnnnnnnnnnnnnnnnnnnnnnnnnnnnnnnnnnnnnnnnnnnnnnnnnnnnnnnnnnnnnnnnnnnnnnnnnnnnnnnnnnnnnnnnnnnnnnnnnnnnnnnnnnnnnnnnnnnnnnnnnnnnnnnnnnnnnnnnnnnnnnnnnnnnnnnnnnnnnnnnnnnnnnnnnnnnnnnnnnnnnnnnnnnnnnnnnnnnnnnnnnnnnnnnnnnnnnnnnnnnnnnnnnnnnnnnnnnnnnnnnnnnnnnnnnnnnnnnnnnnnnnnnnnnnnnnnnnnnnnnnnnnnnnnnnnnnnnnnnnnnnnnnnnnnnnnnnnnnnnnnnnnnnnnnnnnnnnnnnnnnnnnnnnnnnnnnnnnnnnnnnnnnnnnnnnnnnnnnnnnnnnnnnnnnnnnnnnnnnnnnnnnnnnnnnnnnnnnnnnnnnnnnnnnnnnnnnnnnnnnnnnnnnnnnnnnnnnnnnnnnnnnnnnnnnnnnnnnnnnnnnnnnnnnnnnnnnnnnnnnnnnnnnnnnnnnnnnnnnnnnnnnnnnnnnnnnnnnnnnnnnnnnnnnnnnnnnnnnnnnnnnnnnnnnnnnnnnnnnnnnnnnnnnnnnnnnnnnnnnnnnnnnnnnnnnnnnnnnnnnnnnnnnnnnnnnnnnnnnnnnnnnnnnnnnnnnnnnnnnnnnnnnnnnnnnnnnnnnnnnnnnnnnnnnnnnnnnnnnnnnnnnnnnnnnnnnnnnnnnnnnnnnnnnnnnnnnnnnnnnnnnnnnnnnnnnnnnnnnnnnnnnnnnnnnnnnnnnnnnnnnnnnnnnnnnnnnnnnnnnnnnnnnnnnnnnnnnnnnnnnnnnnnnnnnnnnnnnnnnnnnnnnnnnnnnnnnnnnnnnnnnnnnnnnnnnnnnnnnnnnnnnnnnnnnnnnnnnnnnnnnnnnnnnnnnnnnnnnnnnnnnnnnnnnnnnnnnnnnnnnnnnnnnnnnnnnnnnnnnnnnnnnnnnnnnnnnnnnnnnnnnnnnnnnnnnnnnnnnnnnnnnnnnnnnnnnnnnnnnnnnnnnnnnnnnnnnnnnnnnnnnnnnnnnnnnnnnnnnnnnnnnnnnnnnnnnnnnnnnnnnnnnnnnnnnnnnnnnnnnnnnnnnnnnnnnnnnnnnnnnnnnnnnnnnnnnnnnnnnnnnnnnnnnnnnnnnnnnnnnnnnnnnnnnnnnnnnnnnnnnnnnnnnnnnnnnnnnnnnnnnnnnnnnnnnnnnnnnnnnnnnnnnnnnnnnnnnnnnnnnnnnnnnnnnnnnnnnnnnnnnnnnnnnnnnnnnnnnnnnnnnnnnnnnnnnnnnnnnnnnnnnnnnnnnnnnnnnnnnnnnnnnnnnnnnnnnnnnnnnnnnnnnnnnnnnnnnnnnnnnnnnnnnnnnnnnnnnnnnnnnnnnnnnnnnnnnnnnnnnnnnnnnnnnnnnnnnnnnnnnnnnnnnnnnnnnnnnnnnnnnnnnnnnnnnnnnnnnnnnnnnnnnnnnnnnnnnnnnnnnnnnnnnnnnnnnnnnnnnnnnnnnnnnnnnnnnnnnnnnnnnnnnnnnnnnnnnnnnnnnnnnnnnnnnnnnnnnnnnnnnnnnnnnnnnnnnnnnnnnnnnnnnnnnnnnnnnnnnnnnnnnnnnnnnnnnnnnnnnnnnnnnnnnnnnnnnnnnnnnnnnnnnnnnnnnnnnnnnnnnnnnnnnnnnnnnnnnnnnnnnnnnnnnnnnnnnnnnnnnnnnnnnnnnnnnnnnnnnnnnnnnnnnnnnnnnnnnnnnnnnnnnnnnnnnnnnnnnnnnnnnnnnnnnnnnnnnnnnnnnnnnnnnnnnnnnnnnnnnnnnnnnnnnnnnnnnnnnnnnnnnnnnnnnnnnnnnnnnnnnnnnnnnnnnnnnnnnnnnnnnnnnnnnnnnnnnnnnnnnnnnnnnnnnnnnnnnnnnnnnnnnnnnnnnnnnnnnnnnnnnnnnnnnnnnnnnnnnnnnnnnnnnnnnnnnnnnnnnnnnnnnnnnnnnnnnnnnnnnnnnnnnnnnnnnnnnnnnnnnnnnnnnnnnnnnnnnnnnnnnnnnnnnnnnnnnnnnnnnnnnnnnnnnnnnnnnnnnnnnnnnnnnnnnnnnnnnnnnnnnnnnnnnnnnnnnnnnnnnnnnnnnnnnnnnnnnnnnnnnnnnnnnnnnnnnnnnnnnnnnnnnnnnnnnnnnnnnnnnnnnnnnnnnnnnnnnnnnnnnnnnnnnnnnnnnnnnnnnnnnnnnnnnnnnnnnnnnnnnnnnnnnnnnnnnnnnnnnnnnnnnnnnnnnnnnnnnnnnnnnnnnnnnnnnnnnnnnnnnnnnnnnnnnnnnnnnnnnnnnnnnnnnnnnnnnnnnnnnnnnnnnnnnnnnnnnnnnnnnnnnnnnnnnnnnnnnnnnnnnnnnnnnnnnnnnnnnnnnnnnnnnnnnnnnnnnnnnnnnnnnnnnnnnnnnnnnnnnnnnnnnnnnnnnnnnnnnnnnnnnnnnnnnnnnnnnnnnnnnnnnnnnnnnnnnnnnnnnnnnnnnnnnnnnnnnnnnnnnnnnnnnnnnnnnnnnnnnnnnnnnnnnnnnnnnnnnnnnnnnnnnnnnnnnnnnnnnnnnnnnnnnnnnnnnnnnnnnnnnnnnnnnnnnnnnnnnnnnnnnnnnnnnnnnnnnnnnnnnnnnnnnnnnnnnnnnnnnnnnnnnnnnnnnnnnnnnnnnnnnnnnnnnnnnnnnnnnnnnnnnnnnnnnnnnnnnnnnnnnnnnnnnnnnnnnnnnnnnnnnnnnnnnnnnnnnnnnnnnnnnnnnnnnnnnnnnnnnnnnnnnnnnnnnnnnnnnnnnnnnnnnnnnnnnnnnnnnnnnnnnnnnnnnnnnnnnnnnnnnnnnnnnnnnnnnnnnnnnnnnnnnnnnnnnnnnnnnnnnnnnnnnnnnnnnnnnnnnnnnnnnnnnnnnnnnnnnnnnnnnnnnnnnnnnnnnnnnnnnnnnnnnnnnnnnnnnnnnnnnnnnnnnnnnnnnnnnnnnnnnnnnnnnnnnnnnnnnnnnnnnnnnnnnnnnnnnnnnnnnnnnnnnnnnnnnnnnnnnnnnnnnnnnnnnnnnnnnnnnnnnnnnnnnnnnnnnnnnnnnnnnnnnnnnnnnnnnnnnnnnnnnnnnnnnnnnnnnnnnnnnnnnnnnnnnnnnnnnnnnnnnnnnnnnnnnnnnnnnnnnnnnnnnnnnnnnnnnnnnnnnnnnnnnnnnnnnnnnnnnnnnnnnnnnnnnnnnnnnnnnnnnnnnnnnnnnnnnnnnnnnnnnnnnnnnnnnnnnnnnnnnnnnnnnnnnnnnnnnnnnnnnnnnnnnnnnnnnnnnnnnnnnnnnnnnnnnnnnnnnnnnnnnnnnnnnnnnnnnnnnnnnnnnnnnnnnnnnnnnnnnnnnnnnnnnnnnnnnnnnnnnnnnnnnnnnnnnnnnnnnnnnnnnnnnnnnnnnnnnnnnnnnnnnnnnnnnnnnnnnnnnnnnnnnnnnnnnnnnnnnnnnnnnnnnnnnnnnnnnnnnnnnnnnnnnnnnnnnnnnnnnnnnnnnnnnnnnnnnnnnnnnnnnnnnnnnnnnnnnnnnnnnnnnnnnnnnnnnnnnnnnnnnnnnnnnnnnnnnnnnnnnnnnnnnnnnnnnnnnnnnnnnnnnnnnnnnnnnnnnnnnnnnnnnnnnnnnnnnnnnnnnnnnnnnnnnnnnnnnnnnnnnnnnnnnnnnnnnnnnnnnnnnnnnnnnnnnnnnnnnnnnnnnnnnnnnnnnnnnnnnnnnnnnnnnnnnnnnnnnnnnnnnnnnnnnnnnnnnnnnnnnnnnnnnnnnnnnnnnnnnnnnnnnnnnnnnnnnnnnnnnnnnnnnnnnnnnnnnnnnnnnnnnnnnnnnnnnnnnnnnnnnnnnnnnnnnnnnnnnnnnnnnnnnnnnnnnnnnnnnnnnnnnnnnnnnnnnnnnnnnnnnnnnnnnnnnnnnnnnnnnnnnnnnnnnnnnnnnnnnnnnnnnnnnnnnnnnnnnnnnnnnnnnnnnnnnnnnnnnnnnnnnnnnnnnnnnnnnnnnnnnnnnnnnnnnnnnnnnnnnnnnnnnnnnnnnnnnnnnnnnnnnnnnnnnnnnnnnnnnnnnnnnnnnnnnnnnnnnnnnnnnnnnnnnnnnnnnnnnnnnnnnnnnnnnnnnnnnnnnnnnnnnnnnnnnnnnnnnnnnnnnnnnnnnnnnnnnnnnnnnnnnnnnnnnnnnnnnnnnnnnnnnnnnnnnnnnnnnnnnnnnnnnnnnnnnnnnnnnnnnnnnnnnnnnnnnnnnnnnnnnnnnnnnnnnnnnnnnnnnnnnnnnnnnnnnnnnnnnnnnnnnnnnnnnnnnnnnnnnnnnnnnnnnnnnnnnnnnnnnnnnnnnnnnnnnnnnnnnnnnnnnnnnnnnnnnnnnnnnnnnnnnnnnnnnnnnnnnnnnnnnnnnnnnnnnnnnnnnnnnnnnnnnnnnnnnnnnnnnnnnnnnnnnnnnnnnnnnnnnnnnnnnnnnnnnnnnnnnnnnnnnnnnnnnnnnnnnnnnnnnnnnnnnnnnnnnnnnnnnnnnnnnnnnnnnnnnnnnnnnnnnnnnnnnnnnnnnnnnnnnnnnnnnnnnnnnnnnnnnnnnnnnnnnnnnnnnnnnnnnnnnnnnnnnnnnnnnnnnnnnnnnnnnnnnnnnnnnnnnnnnnnnnnnnnnnnnnnnnnnnnnnnnnnnnnnnnnnnnnnnnnnnnnnnnnnnnnnnnnnnnnnnnnnnnnnnnnnnnnnnnnnnnnnnnnnnnnnnnnnnnnnnnnnnnnnnnnnnnnnnnnnnnnnnnnnnnnnnnnnnnnnnnnnnnnnnnnnnnnnnnnnnnnnnnnnnnnnnnnnnnnnnnnnnnnnnnnnnnnnnnnnnnnnnnnnnnnnnnnnnnnnnnnnnnnnnnnnnnnnnnnnnnnnnnnnnnnnnnnnnnnnnnnnnnnnnnnnnnnnnnnnnnnnnnnnnnnnnnnnnnnnnnnnnnnnnnnnnnnnnnnnnnnnnnnnnnnnnnnnnnnnnnnnnnnnnnnnnnnnnnnnnnnnnnnnnnnnnnnnnnnnnnnnnnnnnnnnnnnnnnnnnnnnnnnnnnnnnnnnnnnnnnnnnnnnnnnnnnnnnnnnnnnnnnnnnnnnnnnnnnnnnnnnnnnnnnnnnnnnnnnnnnnnnnnnnnnnnnnnnnnnnnnnnnnnnnnnnnnnnnnnnnnnnnnnnnnnnnnnnnnnnnnnnnnnnnnnnnnnnnnnnnnnnnnnnnnnnnnnnnnnnnnnnnnnnnnnnnnnnnnnnnnnnnnnnnnnnnnnnnnnnnnnnnnnnnnnnnnnnnnnnnnnnnnnnnnnnnnnnnnnnnnnnnnnnnnnnnnnnnnnnnnnnnnnnnnnnnnnnnnnnnnnnnnnnnnnnnnnnnnnnnnnnnnnnnnnnnnnnnnnnnnnnnnnnnnnnnnnnnnnnnnnnnnnnnnnnnnnnnnnnnnnnnnnnnnnnnnnnnnnnnnnnnnnnnnnnnnnnnnnnnnnnnnnnnnnnnnnnnnnnnnnnnnnnnnnnnnnnnnnnnnnnnnnnnnnnnnnnnnnnnnnnnnnnnnnnnnnnnnnnnnnnnnnnnnnnnnnnnnnnnnnnnnnnnnnnnnnnnnnnnnnnnnnnnnnnnnnnnnnnnnnnnnnnnnnnnnnnnnnnnnnnnnnnnnnnnnnnnnnnnnnnnnnnnnnnnnnnnnnnnnnnnnnnnnnnnnnnnnnnnnnnnnnnnnnnnnnnnnnnnnnnnnnnnnnnnnnnnnnnnnnnnnnnnnnnnnnnnnnnnnnnnnnnnnnnnnnnnnnnnnnnnnnnnnnnnnnnnnnnnnnnnnnnnnnnnnnnnnnnnnnnnnnnnnnnnnnnnnnnnnnnnnnnnnnnnnnnnnnnnnnnnnnnnnnnnnnnnnnnnnnnnnnnnnnnnnnnnnnnnnnnnnnnnnnnnnnnnnnnnnnnnnnnnnnnnnnnnnnnnnnnnnnnnnnnnnnnnnnnnnnnnnnnnnnnnnnnnnnnnnnnnnnnnnnnnnnnnnnnnnnnnnnnnnnnnnnnnnnnnnnnnnnnnnnnnnnnnnnnnnnnnnnnnnnnnnnnnnnnnnnnnnnnnnnnnnnnnnnnnnnnnnnnnnnnnnnnnnnnnnnnnnnnnnnnnnnnnnnnnnnnnnnnnnnnnnnnnnnnnnnnnnnnnnnnnnnnnnnnnnnnnnnnnnnnnnnnnnnnnnnnnnnnnnnnnnnnnnnnnnnnnnnnnnnnnnnnnnnnnnnnnnnnnnnnnnnnnnnnnnnnnnnnnnnnnnnnnnnnnnnnnnnnnnnnnnnnnnnnnnnnnnnnnnnnnnnnnnnnnnnnnnnnnnnnnnnnnnnnnnnnnnnnnnnnnnnnnnnnnnnnnnnnnnnnnnnnnnnnnnnnnnnnnnnnnnnnnnnnnnnnnnnnnnnnnnnnnnnnnnnnnnnnnnnnnnnnnnnnnnnnnnnnnnnnnnnnnnnnnnnnnnnnnnnnnnnnnnnnnnnnnnnnnnnnnnnnnnnnnnnnnnnnnnnnnnnnnnnnnnnnnnnnnnnnnnnnnnnnnnnnnnnnnnnnnnnnnnnnnnnnnnnnnnnnnnnnnnnnnnnnnnnnnnnnnnnnnnnnnnnnnnnnnnnnnnnnnnnnnnnnnnnnnnnnnnnnnnnnnnnnnnnnnnnnnnnnnnnnnnnnnnnnnnnnnnnnnnnnnnnnnnnnnnnnnnnnnnnnnnnnnnnnnnnnnnnnnnnnnnnnnnnnnnnnnnnnnnnnnnnnnnnnnnnnnnnnnnnnnnnnnnnnnnnnnnnnnnnnnnnnnnnnnnnnnnnnnnnnnnnnnnnnnnnnnnnnnnnnnnnnnnnnnnnnnnnnnnnnnnnnnnnnnnnnnnnnnnnnnnnnnnnnnnnnnnnnnnnnnnnnnnnnnnnnnnnnnnnnnnnnnnnnnnnnnnnnnnnnnnnnnnnnnnnnnnnnnnnnnnnnnnnnnnnnnnnnnnnnnnnnnnnnnnnnnnnnnnnnnnnnnnnnnnnnnnnnnnnnnnnnnnnnnnnnnnnnnnnnnnnnnnnnnnnnnnnnnnnnnnnnnnnnnnnnnnnnnnnnnnnnnnnnnnnnnnnnnnnnnnnnnnnnnnnnnnnnnnnnnnnnnnnnnnnnnnnnnnnnnnnnnnnnnnnnnnnnnnnnnnnnnnnnnnnnnnnnnnnnnnnnnnnnnnnnnnnnnnnnnnnnnnnnnnnnnnnnnnnnnnnnnnnnnnnnnnnnnnnnnnnnnnnnnnnnnnnnnnnnnnnnnnnnnnnnnnnnnnnnnnnnnnnnnnnnnnnnnnnnnnnnnnnnnnnnnnnnnnnnnnnnnnnnnnnnnnnnnnnnnnnnnnnnnnnnnnnnnnnnnnnnnnnnnnnnnnnnnnnnnnnnnnnnnnnnnnnnnnnnnnnnnnnnnnnnnnnnnnnnnnnnnnnnnnnnnnnnnnnnnnnnnnnnnnnnnnnnnnnnnnnnnnnnnnnnnnnnnnnnnnnnnnnnnnnnnnnnnnnnnnnnnnnnnnnnnnnnnnnnnnnnnnnnnnnnnnnnnnnnnnnnnnnnnnnnnnnnnnnnnnnnnnnnnnnnnnnnnnnnnnnnnnnnnnnnnnnnnnnnnnnnnnnnnnnnnnnnnnnnnnnnnnnnnnnnnnnnnnnnnnnnnnnnnnnnnnnnnnnnnnnnnnnnnnnnnnnnnnnnnnnnnnnnnnnnnnnnnnnnnnnnnnnnnnnnnnnnnnnnnnnnnnnnnnnnnnnnnnnnnnnnnnnnnnnnnnnnnnnnnnnnnnnnnnnnnnnnnnnnnnnnnnnnnnnnnnnnnnnnnnnnnnnnnnnnnnnnnnnnnnnnnnnnnnnnnnnnnnnnnnnnnnnnnnnnnnnnnnnnnnnnnnnnnnnnnnnnnnnnnnnnnnnnnnnnnnnnnnnnnnnnnnnnnnnnnnnnnnnnnnnnnnnnnnnnnnnnnnnnnnnnnnnnnnnnnnnnnnnnnnnnnnnnnnnnnnnnnnnnnnnnnnnnnnnnnnnnnnnnnnnnnnnnnnnnnnnnnnnnnnnnnnnnnnnnnnnnnnnnnnnnnnnnnnnnnnnnnnnnnnnnnnnnnnnnnnnnnnnnnnnnnnnnnnnnnnnnnnnnnnnnnnnnnnnnnnnnnnnnnnnnnnnnnnnnnnnnnnnnnnnnnnnnnnnnnnnnnnnnnnnnnnnnnnnnnnnnnnnnnnnnnnnnnnnnnnnnnnnnnnnnnnnnnnnnnnnnnnnnnnnnnnnnnnnnnnnnnnnnnnnnnnnnnnnnnnnnnnnnnnnnnnnnnnnnnnnnnnnnnnnnnnnnnnnnnnnnnnnnnnnnnnnnnnnnnnnnnnnnnnnnnnnnnnnnnnnnnnnnnnnnnnnnnnnnnnnnnnnnnnnnnnnnnnnnnnnnnnnnnnnnnnnnnnnnnnnnnnnnnnnnnnnnnnnnnnnnnnnnnnnnnnnnnnnnnnnnnnnnnnnnnnnnnnnnnnnnnnnnnnnnnnnnnnnnnnnnnnnnnnnnnnnnnnnnnnnnnnnnnnnnnnnnnnnnnnnnnnnnnnnnnnnnnnnnnnnnnnnnnnnnnnnnnnnnnnnnnnnnnnnnnnnnnnnnnnnnnnnnnnnnnnnnnnnnnnnnnnnnnnnnnnnnnnnnnnnnnnnnnnnnnnnnnnnnnnnnnnnnnnnnnnnnnnnnnnnnnnnnnnnnnnnnnnnnnnnnnnnnnnnnnnnnnnnnnnnnnnnnnnnnnnnnnnnnnnnnnnnnnnnnnnnnnnnnnnnnnnnnnnnnnnnnnnnnnnnnnnnnnnnnnnnnnnnnnnnnnnnnnnnnnnnnnnnnnnnnnnnnnnnnnnnnnnnnnnnnnnnnnnnnnnnnnnnnnnnnnnnnnnnnnnnnnnnnnnnnnnnnnnnnnnnnnnnnnnnnnnnnnnnnnnnnnnnnnnnnnnnnnnnnnnnnnnnnnnnnnnnnnnnnnnnnnnnnnnnnnnnnnnnnnnnnnnnnnnnnnnnnnnnnnnnnnnnnnnnnnnnnnnnnnnnnnnnnnnnnnnnnnnnnnnnnnnnnnnnnnnnnnnnnnnnnnnnnnnnnnnnnnnnnnnnnnnnnnnnnnnnnnnnnnnnnnnnnnnnnnnnnnnnnnnnnnnnnnnnnnnnnnnnnnnnnnnnnnnnnnnnnnnnnnnnnnnnnnnnnnnnnnnnnnnnnnnnnnnnnnnnnnnnnnnnnnnnnnnnnnnnnnnnnnnnnnnnnnnnnnnnnnnnnnnnnnnnnnnnnnnnnnnnnnnnnnnnnnnnnnnnnnnnnnnnnnnnnnnnnnnnnnnnnnnnnnnnnnnnnnnnnnnnnnnnnnnnnnnnnnnnnnnnnnnnnnnnnnnnnnnnnnnnnnnnnnnnnnnnnnnnnnnnnnnnnnnnnnnnnnnnnnnnnnnnnnnnnnnnnnnnnnnnnnnnnnnnnnnnnnnnnnnnnnnnnnnnnnnnnnnnnnnnnnnnnnnnnnnnnnnnnnnnnnnnnnnnnnnnnnnnnnnnnnnnnnnnnnnnnnnnnnnnnnnnnnnnnnnnnnnnnnnnnnnnnnnnnnnnnnnnnnnnnnnnnnnnnnnnnnnnnnnnnnnnnnnnnnnnnnnnnnnnnnnnnnnnnnnnnnnnnnnnnnnnnnnnnnnnnnnnnnnnnnnnnnnnnnnnnnnnnnnnnnnnnnnnnnnnnnnnnnnnnnnnnnnnnnnnnnnnnnnnnnnnnnnnnnnnnnnnnnnnnnnnnnnnnnnnnnnnnnnnnnnnnnnnnnnnnnnnnnnnnnnnnnnnnnnnnnnnnnnnnnnnnnnnnnnnnnnnnnnnnnnnnnnnnnnnnnnnnnnnnnnnnnnnnnnnnnnnnnnnnnnnnnnnnnnnnnnnnnnnnnnnnnnnnnnnnnnnnnnnnnnnnnnnnnnnnnnnnnnnnnnnnnnnnnnnnnnnnnnnnnnnnnnnnnnnnnnnnnnnnnnnnnnnnnnnnnnnnnnnnnnnnnnnnnnnnnnnnnnnnnnnnnnnnnnnnnnnnnnnnnnnnnnnnnnnnnnnnnnnnnnnnnnnnnnnnnnnnnnnnnnnnnnnnnnnnnnnnnnnnnnnnnnnnnnnnnnnnnnnnnnnnnnnnnnnnnnnnnnnnnnnnnnnnnnnnnnnnnnnnnnnnnnnnnnnnnnnnnnnnnnnnnnnnnnnnnnnnnnnnnnnnnnnnnnnnnnnnnnnnnnnnnnnnnnnnnnnnnnnnnnnnnnnnnnnnnnnnnnnnnnnnnnnnnnnnnnnnnnnnnnnnnnnnnnnnnnnnnnnnnnnnnnnnnnnnnnnnnnnnnnnnnnnnnnnnnnnnnnnnnnnnnnnnnnnnnnnnnnnnnnnnnnnnnnnnnnnnnnnnnnnnnnnnnnnnnnnnnnnnnnnnnnnnnnnnnnnnnnnnnnnnnnnnnnnnnnnnnnnnnnnnnnnnnnnnnnnnnnnnnnnnnnnnnnnnnnnnnnnnnnnnnnnnnnnnnnnnnnnnnnnnnnnnnnnnnnnnnnnnnnnnnnnnnnnnnnnnnnnnnnnnnnnnnnnnnnnnnnnnnnnnnnnnnnnnnnnnnnnnnnnnnnnnnnnnnnnnnnnnnnnnnnnnnnnnnnnnnnnnnnnnnnnnnnnnnnnnnnnnnnnnnnnnnnnnnnnnnnnnnnnnnnnnnnnnnnnnnnnnnnnnnnnnnnnnnnnnnnnnnnnnnnnnnnnnnnnnnnnnnnnnnnnnnnnnnnnnnnnnnnnnnnnnnnnnnnnnnnnnnnnnnnnnnnnnnnnnnnnnnnnnnnnnnnnnnnnnnnnnnnnnnnnnnnnnnnnnnnnnnnnnnnnnnnnnnnnnnnnnnnnnnnnnnnnnnnnnnnnnnnnnnnnnnnnnnnnnnnnnnnnnnnnnnnnnnnnnnnnnnnnnnnnnnnnnnnnnnnnnnnnnnnnnnnnnnnnnnnnnnnnnnnnnnnnnnnnnnnnnnnnnnnnnnnnnnnnnnnnnnnnnnnnnnnnnnnnnnnnnnnnnnnnnnnnnnnnnnnnnnnnnnnnnnnnnnnnnnnnnnnnnnnnnnnnnnnnnnnnnnnnnnnnnnnnnnnnnnnnnnnnnnnnnnnnnnnnnnnnnnnnnnnnnnnnnnnnnnnnnnnnnnnnnnnnnnnnnnnnnnnnnnnnnnnnnnnnnnnnnnnnnnnnnnnnnnnnnnnnnnnnnnnnnnnnnnnnnnnnnnnnnnnnnnnnnnnnnnnnnnnnnnnnnnnnnnnnnnnnnnnnnnnnnnnnnnnnnnnnnnnnnnnnnnnnnnnnnnnnnnnnnnnnnnnnnnnnnnnnnnnnnnnnnnnnnnnnnnnnnnnnnnnnnnnnnnnnnnnnnnnnnnnnnnnnnnnnnnnnnnnnnnnnnnnnnnnnnnnnnnnnnnnnnnnnnnnnnnnnnnnnnnnnnnnnnnnnnnnnnnnnnnnnnnnnnnnnnnnnnnnnnnnnnnnnnnnnnnnnnnnnnnnnnnnnnnnnnnnnnnnnnnnnnnnnnnnnnnnnnnnnnnnnnnnnnnnnnnnnnnnnnnnnnnnnnnnnnnnnnnnnnnnnnnnnnnnnnnnnnnnnnnnnnnnnnnnnnnnnnnnnnnnnnnnnnnnnnnnnnnnnnnnnnnnnnnnnnnnnnnnnnnnnnnnnnnnnnnnnnnnnnnnnnnnnnnnnnnnnnnnnnnnnnnnnnnnnnnnnnnnnnnnnnnnnnnnnnnnnnnnnnnnnnnnnnnnnnnnnnnnnnnnnnnnnnnnnnnnnnnnnnnnnnnnnnnnnnnnnnnnnnnnnnnnnnnnnnnnnnnnnnnnnnnnnnnnnnnnnnnnnnnnnnnnnnnnnnnnnnnnnnnnnnnnnnnnnnnnnnnnnnnnnnnnnnnnnnnnnnnnnnnnnnnnnnnnnnnnnnnnnnnnnnnnnnnnnnnnnnnnnnnnnnnnnnnnnnnnnnnnnnnnnnnnnnnnnnnnnnnnnnnnnnnnnnnnnnnnnnnnnnnnnnnnnnnnnnnnnnnnnnnnnnnnnnnnnnnnnnnnnnnnnnnnnnnnnnnnnnnnnnnnnnnnnnnnnnnnnnnnnnnnnnnnnnnnnnnnnnnnnnnnnnnnnnnnnnnnnnnnnnnnnnnnnnnnnnnnnnnnnnnnnnnnnnnnnnnnnnnnnnnnnnnnnnnnnnnnnnnnnnnnnnnnnnnnnnnnnnnnnnnnnnnnnnnnnnnnnnnnnnnnnnnnnnnnnnnnnnnnnnnnnnnnnnnnnnnnnnnnnnnnnnnnnnnnnnnnnnnnnnnnnnnnnnnnnnnnnnnnnnnnnnnnnnnnnnnnnnnnnnnnnnnnnnnnnnnnnnnnnnnnnnnnnnnnnnnnnnnnnnnnnnnnnnnnnnnnnnnnnnnnnnnnnnnnnnnnnnnnnnnnnnnnnnnnnnnnnnnnnnnnnnnnnnnnnnnnnnnnnnnnnnnnnnnnnnnnnnnnnnnnnnnnnnnnnnnnnnnnnnnnnnnnnnnnnnnnnnnnnnnnnnnnnnnnnnnnnnnnnnnnnnnnnnnnnnnnnnnnnnnnnnnnnnnnnnnnnnnnnnnnnnnnnnnnnnnnnnnnnnnnnnnnnnnnnnnnnnnnnnnnnnnnnnnnnnnnnnnnnnnnnnnnnnnnnnnnnnnnnnnnnnnnnnnnnnnnnnnnnnnnnnnnnnnnnnnnnnnnnnnnnnnnnnnnnnnnnnnnnnnnnnnnnnnnnnnnnnnnnnnnnnnnnnnnnnnnnnnnnnnnnnnnnnnnnnnnnnnnnnnnnnnnnnnnnnnnnnnnnnnnnnnnnnnnnnnnnnnnnnnnnnnnnnnnnnnnnnnnnnnnnnnnnnnnnnnnnnnnnnnnnnnnnnnnnnnnnnnnnnnnnnnnnnnnnnnnnnnnnnnnnnnnnnnnnnnnnnnnnnnnnnnnnnnnnnnnnnnnnnnnnnnnnnnnnnnnnnnnnnnnnnnnnnnnnnnnnnnnnnnnnnnnnnnnnnnnnnnnnnnnnnnnnnnnnnnnnnnnnnnnnnnnnnnnnnnnnnnnnnnnnnnnnnnnnnnnnnnnnnnnnnnnnnnnnnnnnnnnnnnnnnnnnnnnnnnnnnnnnnnnnnnnnnnnnnnnnnnnnnnnnnnnnnnnnnnnnnnnnnnnnnnnnnnnnnnnnnnnnnnnnnnnnnnnnnnnnnnnnnnnnnnnnnnnnnnnnnnnnnnnnnnnnnnnnnnnnnnnnnnnnnnnnnnnnnnnnnnnnnnnnnnnnnnnnnnnnnnnnnnnnnnnnnnnnnnnnnnnnnnnnnnnnnnnnnnnnnnnnnnnnnnnnnnnnnnnnnnnnnnnnnnnnnnnnnnnnnnnnnnnnnnnnnnnnnnnnnnnnnnnnnnnnnnnnnnnnnnnnnnnnnnnnnnnnnnnnnnnnnnnnnnnnnnnnnnnnnnnnnnnnnnnnnnnnnnnnnnnnnnnnnnnnnnnnnnnnnnnnnnnnnnnnnnnnnnnnnnnnnnnnnnnnnnnnnnnnnnnnnnnnnnnnnnnnnnnnnnnnnnnnnnnnnnnnnnnnnnnnnnnnnnnnnnnnnnnnnnnnnnnnnnnnnnnnnnnnnnnnnnnnnnnnnnnnnnnnnnnnnnnnnnnnnnnnnnnnnnnnnnnnnnnnnnnnnnnnnnnnnnnnnnnnnnnnnnnnnnnnnnnnnnnnnnnnnnnnnnnnnnnnnnnnnnnnnnnnnnnnnnnnnnnnnnnnnnnnnnnnnnnnnnnnnnnnnnnnnnnnnnnnnnnnnnnnnnnnnnnnnnnnnnnnnnnnnnnnnnnnnnnnnnnnnnnnnnnnnnnnnnnnnnnnnnnnnnnnnnnnnnnnnnnnnnnnnnnnnnnnnnnnnnnnnnnnnnnnnnnnnnnnnnnnnnnnnnnnnnnnnnnnnnnnnnnnnnnnnnnnnnnnnnnnnnnnnnnnnnnnnnnnnnnnnnnnnnnnnnnnnnnnnnnnnnnnnnnnnnnnnnnnnnnnnnnnnnnnnnnnnnnnnnnnnnnnnnnnnnnnnnnnnnnnnnnnnnnnnnnnnnnnnnnnnnnnnnnnnnnnnnnnnnnnnnnnnnnnnnnnnnnnnnnnnnnnnnnnnnnnnnnnnnnnnnnnnnnnnnnnnnnnnnnnnnnnnnnnnnnnnnnnnnnnnnnnnnnnnnnnnnnnnnnnnnnnnnnnnnnnnnnnnnnnnnnnnnnnnnnnnnnnnnnnnnnnnnnnnnnnnnnnnnnnnnnnnnnnnnnnnnnnnnnnnnnnnnnnnnnnnnnnnnnnnnnnnnnnnnnnnnnnnnnnnnnnnnnnnnnnnnnnnnnnnnnnnnnnnnnnnnnnnnnnnnnnnnnnnnnnnnnnnnnnnnnnnnnnnnnnnnnnnnnnnnnnnnnnnnnnnnnnnnnnnnnnnnnnnnnnnnnnnnnnnnnnnnnnnnnnnnnnnnnnnnnnnnnnnnnnnnnnnnnnnnnnnnnnnnnnnnnnnnnnnnnnnnnnnnnnnnnnnnnnnnnnnnnnnnnnnnnnnnnnnnnnnnnnnnnnnnnnnnnnnnnnnnnnnnnnnnnnnnnnnnnnnnnnnnnnnnnnnnnnnnnnnnnnnnnnnnnnnnnnnnnnnnnnnnnnnnnnnnnnnnnnnnnnnnnnnnnnnnnnnnnnnnnnnnnnnnnnnnnnnnnnnnnnnnnnnnnnnnnnnnnnnnnnnnnnnnnnnnnnnnnnnnnnnnnnnnnnnnnnnnnnnnnnnnnnnnnnnnnnnnnnnnnnnnnnnnnnnnnnnnnnnnnnnnnnnnnnnnnnnnnnnnnnnnnnnnnnnnnnnnnnnnnnnnnnnnnnnnnnnnnnnnnnnnnnnnnnnnnnnnnnnnnnnnnnnnnnnnnnnnnnnnnnnnnnnnnnnnnnnnnnnnnnnnnnnnnnnnnnnnnnnnnnnnnnnnnnnnnnnnnnnnnnnnnnnnnnnnnnnnnnnnnnnnnnnnnnnnnnnnnnnnnnnnnnnnnnnnnnnnnnnnnnnnnnnnnnnnnnnnnnnnnnnnnnnnnnnnnnnnnnnnnnnnnnnnnnnnnnnnnnnnnnnnnnnnnnnnnnnnnnnnnnnnnnnnnnnnnnnnnnnnnnnnnnnnnnnnnnnnnnnnnnnnnnnnnnnnnnnnnnnnnnnnnnnnnnnnnnnnnnnnnnnnnnnnnnnnnnnnnnnnnnnnnnnnnnnnnnnnnnnnnnnnnnnnnnnnnnnnnnnnnnnnnnnnnnnnnnnnnnnnnnnnnnnnnnnnnnnnnnnnnnnnnnnnnnnnnnnnnnnnnnnnnnnnnnnnnnnnnnnnnnnnnnnnnnnnnnnnnnnnnnnnnnnnnnnnnnnnnnnnnnnnnnnnnnnnnnnnnnnnnnnnnnnnnnnnnnnnnnnnnnnnnnnnnnnnnnnnnnnnnnnnnnnnnnnnnnnnnnnnnnnnnnnnnnnnnnnnnnnnnnnnnnnnnnnnnnnnnnnnnnnnnnnnnnnnnnnnnnnnnnnnnnnnnnnnnnnnnnnnnnnnnnnnnnnnnnnnnnnnnnnnnnnnnnnnnnnnnnnnnnnnnnnnnnnnnnnnnnnnnnnnnnnnnnnnnnnnnnnnnnnnnnnnnnnnnnnnnnnnnnnnnnnnnnnnnnnnnnnnnnnnnnnnnnnnnnnnnnnnnnnnnnnnnnnnnnnnnnnnnnnnnnnnnnnnnnnnnnnnnnnnnnnnnnnnnnnnnnnnnnnnnnnnnnnnnnnnnnnnnnnnnnnnnnnnnnnnnnnnnnnnnnnnnnnnnnnnnnnnnnnnnnnnnnnnnnnnnnnnnnnnnnnnnnnnnnnnnnnnnnnnnnnnnnnnnnnnnnnnnnnnnnnnnnnnnnnnnnnnnnnnnnnnnnnnnnnnnnnnnnnnnnnnnnnnnnnnnnnnnnnnnnnnnnnnnnnnnnnnnnnnnnnnnnnnnnnnnnnnnnnnnnnnnnnnnnnnnnnnnnnnnnnnnnnnnnnnnnnnnnnnnnnnnnnnnnnnnnnnnnnnnnnnnnnnnnnnnnnnnnnnnnnnnnnnnnnnnnnnnnnnnnnnnnnnnnnnnnnnnnnnnnnnnnnnnnnnnnnnnnnnnnnnnnnnnnnnnnnnnnnnnnnnnnnnnnnnnnnnnnnnnnnnnnnnnnnnnnnnnnnnnnnnnnnnnnnnnnnnnnnnnnnnnnnnnnnnnnnnnnnnnnnnnnnnnnnnnnnnnnnnnnnnnnnnnnnnnnnnnnnnnnnnnnnnnnnnnnnnnnnnnnnnnnnnnnnnnnnnnnnnnnnnnnnnnnnnnnnnnnnnnnnnnnnnnnnnnnnnnnnnnnnnnnnnnnnnnnnnnnnnnnnnnnnnnnnnnnnnnnnnnnnnnnnnnnnnnnnnnnnnnnnnnnnnnnnnnnnnnnnnnnnnnnnnnnnnnnnnnnnnnnnnnnnnnnnnnnnnnnnnnnnnnnnnnnnnnnnnnnnnnnnnnnnnnnnnnnnnnnnnnnnnnnnnnnnnnnnnnnnnnnnnnnnnnnnnnnnnnnnnnnnnnnnnnnnnnnnnnnnnnnnnnnnnnnnnnnnnnnnnnnnnnnnnnnnnnnnnnnnnnnnnnnnnnnnnnnnnnnnnnnnnnnnnnnnnnnnnnnnnnnnnnnnnnnnnnnnnnnnnnnnnnnnnnnnnnnnnnnnnnnnnnnnnnnnnnnnnnnnnnnnnnnnnnnnnnnnnnnnnnnnnnnnnnnnnnnnnnnnnnnnnnnnnnnnnnnnnnnnnnnnnnnnnnnnnnnnnnnnnnnnnnnnnnnnnnnnnnnnnnnnnnnnnnnnnnnnnnnnnnnnnnnnnnnnnnnnnnnnnnnnnnnnnnnnnnnnnnnnnnnnnnnnnnnnnnnnnnnnnnnnnnnnnnnnnnnnnnnnnnnnnnnnnnnnnnnnnnnnnnnnnnnnnnnnnnnnnnnnnnnnnnnnnnnnnnnnnnnnnnnnnnnnnnnnnnnnnnnnnnnnnnnnnnnnnnnnnnnnnnnnnnnnnnnnnnnnnnnnnnnnnnnnnnnnnnnnnnnnnnnnnnnnnnnnnnnnnnnnnnnnnnnnnnnnnnnnnnnnnnnnnnnnnnnnnnnnnnnnnnnnnnnnnnnnnnnnnnnnnnnnnnnnnnnnnnnnnnnnnnnnnnnnnnnnnnnnnnnnnnnnnnnnnnnnnnnnnnnnnnnnnnnnnnnnnnnnnnnnnnnnnnnnnnnnnnnnnnnnnnnnnnnnnnnnnnnnnnnnnnnnnnnnnnnnnnnnnnnnnnnnnnnnnnnnnnnnnnnnnnnnnnnnnnnnnnnnnnnnnnnnnnnnnnnnnnnnnnnnnnnnnnnnnnnnnnnnnnnnnnnnnnnnnnnnnnnnnnnnnnnnnnnnnnnnnnnnnnnnnnnnnnnnnnnnnnnnnnnnnnnnnnnnnnnnnnnnnnnnnnnnnnnnnnnnnnnnnnnnnnnnnnnnnnnnnnnnnnnnnnnnnnnnnnnnnnnnnnnnnnnnnnnnnnnnnnnnnnnnnnnnnnnnnnnnnnnnnnnnnnnnnnnnnnnnnnnnnnnnnnnnnnnnnnnnnnnnnnnnnnnnnnnnnnnnnnnnnnnnnnnnnnnnnnnnnnnnnnnnnnnnnnnnnnnnnnnnnnnnnnnnnnnnnnnnnnnnnnnnnnnnnnnnnnnnnnnnnnnnnnnnnnnnnnnnnnnnnnnnnnnnnnnnnnnnnnnnnnnnnnnnnnnnnnnnnnnnnnnnnnnnnnnnnnnnnnnnnnnnnnnnnnnnnnnnnnnnnnnnnnnnnnnnnnnnnnnnnnnnnnnnnnnnnnnnnnnnnnnnnnnnnnnnnnnnnnnnnnnnnnnnnnnnnnnnnnnnnnnnnnnnnnnnnnnnnnnnnnnnnnnnnnnnnnnnnnnnnnnnnnnnnnnnnnnnnnnnnnnnnnnnnnnnnnnnnnnnnnnnnnnnnnnnnnnnnnnnnnnnnnnnnnnnnnnnnnnnnnnnnnnnnnnnnnnnnnnnnnnnnnnnnnnnnnnnnnnnnnnnnnnnnnnnnnnnnnnnnnnnnnnnnnnnnnnnnnnnnnnnnnnnnnnnnnnnnnnnnnnnnnnnnnnnnnnnnnnnnnnnnnnnnnnnnnnnnnnnnnnnnnnnnnnnnnnnnnnnnnnnnnnnnnnnnnnnnnnnnnnnnnnnnnnnnnnnnnnnnnnnnnnnnnnnnnnnnnnnnnnnnnnnnnnnnnnnnnnnnnnnnnnnnnnnnnnnnnnnnnnnnnnnnnnnnnnnnnnnnnnnnnnnnnnnnnnnnnnnnnnnnnnnnnnnnnnnnnnnnnnnnnnnnnnnnnnnnnnnnnnnnnnnnnnnnnnnnnnnnnnnnnnnnnnnnnnnnnnnnnnnnnnnnnnnnnnnnnnnnnnnnnnnnnnnnnnnnnnnnnnnnnnnnnnnnnnnnnnnnnnnnnnnnnnnnnnnnnnnnnnnnnnnnnnnnnnnnnnnnnnnnnnnnnnnnnnnnnnnnnnnnnnnnnnnnnnnnnnnnnnnnnnnnnnnnnnnnnnnnnnnnnnnnnnnnnnnnnnnnnnnnnnnnnnnnnnnnnnnnnnnnnnnnnnnnnnnnnnnnnnnnnnnnnnnnnnnnnnnnnnnnnnnnnnnnnnnnnnnnnnnnnnnnnnnnnnnnnnnnnnnnnnnnnnnnnnnnnnnnnnnnnnnnnnnnnnnnnnnnnnnnnnnnnnnnnnnnnnnnnnnnnnnnnnnnnnnnnnnnnnnnnnnnnnnnnnnnnnnnnnnnnnnnnnnnnnnnnnnnnnnnnnnnnnnnnnnnnnnnnnnnnnnnnnnnnnnnnnnnnnnnnnnnnnnnnnnnnnnnnnnnnnnnnnnnnnnnnnnnnnnnnnnnnnnnnnnnnnnnnnnnnnnnnnnnnnnnnnnnnnnnnnnnnnnnnnnnnnnnnnnnnnnnnnnnnnnnnnnnnnnnnnnnnnnnnnnnnnnnnnnnnnnnnnnnnnnnnnnnnnnnnnnnnnnnnnnnnnnnnnnnnnnnnnnnnnnnnnnnnnnnnnnnnnnnnnnnnnnnnnnnnnnnnnnnnnnnnnnnnnnnnnnnnnnnnnnnnnnnnnnnnnnnnnnnnnnnnnnnnnnnnnnnnnnnnnnnnnnnnnnnnnnnnnnnnnnnnnnnnnnnnnnnnnnnnnnnnnnnnnnnnnnnnnnnnnnnnnnnnnnnnnnnnnnnnnnnnnnnnnnnnnnnnnnnnnnnnnnnnnnnnnnnnnnnnnnnnnnnnnnnnnnnnnnnnnnnnnnnnnnnnnnnnnnnnnnnnnnnnnnnnnnnnnnnnnnnnnnnnnnnnnnnnnnnnnnnnnnnnnnnnnnnnnnnnnnnnnnnnnnnnnnnnnnnnnnnnnnnnnnnnnnnnnnnnnnnnnnnnnnnnnnnnnnnnnnnnnnnnnnnnnnnnnnnnnnnnnnnnnnnnnnnnnnnnnnnnnnnnnnnnnnnnnnnnnnnnnnnnnnnnnnnnnnnnnnnnnnnnnnnnnnnnnnnnnnnnnnnnnnnnnnnnnnnnnnnnnnnnnnnnnnnnnnnnnnnnnnnnnnnnnnnnnnnnnnnnnnnnnnnnnnnnnnnnnnnnnnnnnnnnnnnnnnnnnnnnnnnnnnnnnnnnnnnnnnnnnnnnnnnnnnnnnnnnnnnnnnnnnnnnnnnnnnnnnnnnnnnnnnnnnnnnnnnnnnnnnnnnnnnnnnnnnnnnnnnnnnnnnnnnnnnnnnnnnnnnnnnnnnnnnnnnnnnnnnnnnnnnnnnnnnnnnnnnnnnnnnnnnnnnnnnnnnnnnnnnnnnnnnnnnnnnnnnnnnnnnnnnnnnnnnnnnnnnnnnnnnnnnnnnnnnnnnnnnnnnnnnnnnnnnnnnnnnnnnnnnnnnnnnnnnnnnnnnnnnnnnnnnnnnnnnnnnnnnnnnnnnnnnnnnnnnnnnnnnnnnnnnnnnnnnnnnnnnnnnnnnnnnnnnnnnnnnnnnnnnnnnnnnnnnnnnnnnnnnnnnnnnnnnnnnnnnnnnnnnnnnnnnnnnnnnnnnnnnnnnnnnnnnnnnnnnnnnnnnnnnnnnnnnnnnnnnnnnnnnnnnnnnnnnnnnnnnnnnnnnnnnnnnnnnnnnnnnnnnnnnnnnnnnnnnnnnnnnnnnnnnnnnnnnnnnnnnnnnnnnnnnnnnnnnnnnnnnnnnnnnnnnnnnnnnnnnnnnnnnnnnnnnnnnnnnnnnnnnnnnnnnnnnnnnnnnnnnnnnnnnnnnnnnnnnnnnnnnnnnnnnnnnnnnnnnnnnnnnnnnnnnnnnnnnnnnnnnnnnnnnnnnnnnnnnnnnnnnnnnnnnnnnnnnnnnnnnnnnnnnnnnnnnnnnnnnnnnnnnnnnnnnnnnnnnnnnnnnnnnnnnnnnnnnnnnnnnnnnnnnnnnnnnnnnnnnnnnnnnnnnnnnnnnnnnnnnnnnnnnnnnnnnnnnnnnnnnnnnnnnnnnnnnnnnnnnnnnnnnnnnnnnnnnnnnnnnnnnnnnnnnnnnnnnnnnnnnnnnnnnnnnnnnnnnnnnnnnnnnnnnnnnnnnnnnnnnnnnnnnnnnnnnnnnnnnnnnnnnnnnnnnnnnnnnnnnnnnnnnnnnnnnnnnnnnnnnnnnnnnnnnnnnnnnnnnnnnnnnnnnnnnnnnnnnnnnnnnnnnnnnnnnnnnnnnnnnnnnnnnnnnnnnnnnnnnnnnnnnnnnnnnnnnnnnnnnnnnnnnnnnnnnnnnnnnnnnnnnnnnnnnnnnnnnnnnnnnnnnnnnnnnnnnnnnnnnnnnnnnnnnnnnnnnnnnnnnnnnnnnnnnnnnnnnnnnnnnnnnnnnnnnnnnnnnnnnnnnnnnnnnnnnnnnnnnnnnnnnnnnnnnnnnnnnnnnnnnnnnnnnnnnnnnnnnnnnnnnnnnnnnnnnnnnnnnnnnnnnnnnnnnnnnnnnnnnnnnnnnnnnnnnnnnnnnnnnnnnnnnnnnnnnnnnnnnnnnnnnnnnnnnnnnnnnnnnnnnnnnnnnnnnnnnnnnnnnnnnnnnnnnnnnnnnnnnnnnnnnnnnnnnnnnnnnnnnnnnnnnnnnnnnnnnnnnnnnnnnnnnnnnnnnnnnnnnnnnnnnnnnnnnnnnnnnnnnnnnnnnnnnnnnnnnnnnnnnnnnnnnnnnnnnnnnnnnnnnnnnnnnnnnnnnnnnnnnnnnnnnnnnnnnnnnnnnnnnnnnnnnnnnnnnnnnnnnnnnnnnnnnnnnnnnnnnnnnnnnnnnnnnnnnnnnnnnnnnnnnnnnnnnnnnnnnnnnnnnnnnnnnnnnnnnnnnnnnnnnnnnnnnnnnnnnnnnnnnnnnnnnnnnnnnnnnnnnnnnnnnnnnnnnnnnnnnnnnnnnnnnnnnnnnnnnnnnnnnnnnnnnnnnnnnnnnnnnnnnnnnnnnnnnnnnnnnnnnnnnnnnnnnnnnnnnnnnnnnnnnnnnnnnnnnnnnnnnnnnnnnnnnnnnnnnnnnnnnnnnnnnnnnnnnnnnnnnnnnnnnnnnnnnnnnnnnnnnnnnnnnnnnnnnnnnnnnnnnnnnnnnnnnnnnnnnnnnnnnnnnnnnnnnnnnnnnnnnnnnnnnnnnnnnnnnnnnnnnnnnnnnnnnnnnnnnnnnnnnnnnnnnnnnnnnnnnnnnnnnnnnnnnnnnnnnnnnnnnnnnnnnnnnnnnnnnnnnnnnnnnnnnnnnnnnnnnnnnnnnnnnnnnnnnnnnnnnnnnnnnnnnnnnnnnnnnnnnnnnnnnnnnnnnnnnnnnnnnnnnnnnnnnnnnnnnnnnnnnnnnnnnnnnnnnnnnnnnnnnnnnnnnnnnnnnnnnnnnnnnnnnnnnnnnnnnnnnnnnnnnnnnnnnnnnnnnnnnnnnnnnnnnnnnnnnnnnnnnnnnnnnnnnnnnnnnnnnnnnnnnnnnnnnnnnnnnnnnnnnnnnnnnnnnnnnnnnnnnnnnnnnnnnnnnnnnnnnnnnnnnnnnnnnnnnnnnnnnnnnnnnnnnnnnnnnnnnnnnnnnnnnnnnnnnnnnnnnnnnnnnnnnnnnnnnnnnnnnnnnnnnnnnnnnnnnnnnnnnnnnnnnnnnnnnnnnnnnnnnnnnnnnnnnnnnnnnnnnnnnnnnnnnnnnnnnnnnnnnnnnnnnnnnnnnnnnnnnnnnnnnnnnnnnnnnnnnnnnnnnnnnnnnnnnnnnnnnnnnnnnnnnnnnnnnnnnnnnnnnnnnnnnnnnnnnnnnnnnnnnnnnnnnnnnnnnnnnnnnnnnnnnnnnnnnnnnnnnnnnnnnnnnnnnnnnnnnnnnnnnnnnnnnnnnnnnnnnnnnnnnnnnnnnnnnnnnnnnnnnnnnnnnnnnnnnnnnnnnnnnnnnnnnnnnnnnnnnnnnnnnnnnnnnnnnnnnnnnnnnnnnnnnnnnnnnnnnnnnnnnnnnnnnnnnnnnnnnnnnnnnnnnnnnnnnnnnnnnnnnnnnnnnnnnnnnnnnnnnnnnnnnnnnnnnnnnnnnnnnnnnnnnnnnnnnnnnnnnnnnnnnnnnnnnnnnnnnnnnnnnnnnnnnnnnnnnnnnnnnnnnnnnnnnnnnnnnnnnnnnnnnnnnnnnnnnnnnnnnnnnnnnnnnnnnnnnnnnnnnnnnnnnnnnnnnnnnnnnnnnnnnnnnnnnnnnnnnnnnnnnnnnnnnnnnnnnnnnnnnnnnnnnnnnnnnnnnnnnnnnnnnnnnnnnnnnnnnnnnnnnnnnnnnnnnnnnnnnnnnnnnnnnnnnnnnnnnnnnnnnnnnnnnnnnnnnnnnnnnnnnnnnnnnnnnnnnnnnnnnnnnnnnnnnnnnnnnnnnnnnnnnnnnnnnnnnnnnnnnnnnnnnnnnnnnnnnnnnnnnnnnnnnnnnnnnnnnnnnnnnnnnnnnnnnnnnnnnnnnnnnnnnnnnnnnnnnnnnnnnnnnnnnnnnnnnnnnnnnnnnnnnnnnnnnnnnnnnnnnnnnnnnnnnnnnnnnnnnnnnnnnnnnnnnnnnnnnnnnnnnnnnnnnnnnnnnnnnnnnnnnnnnnnnnnnnnnnnnnnnnnnnnnnnnnnnnnnnnnnnnnnnnnnnnnnnnnnnnnnnnnnnnnnnnnnnnnnnnnnnnnnnnnnnnnnnnnnnnnnnnnnnnnnnnnnnnnnnnnnnnnnnnnnnnnnnnnnnnnnnnnnnnnnnnnnnnnnnnnnnnnnnnnnnnnnnnnnnnnnnnnnnnnnnnnnnnnnnnnnnnnnnnnnnnnnnnnnnnnnnnnnnnnnnnnnnnnnnnnnnnnnnnnnnnnnnnnnnnnnnnnnnnnnnnnnnnnnnnnnnnnnnnnnnnnnnnnnnnnnnnnnnnnnnnnnnnnnnnnnnnnnnnnnnnnnnnnnnnnnnnnnnnnnnnnnnnnnnnnnnnnnnnnnnnnnnnnnnnnnnnnnnnnnnnnnnnnnnnnnnnnnnnnnnnnnnnnnnnnnnnnnnnnnnnnnnnnnnnnnnnnnnnnnnnnnnnnnnnnnnnnnnnnnnnnnnnnnnnnnnnnnnnnnnnnnnnnnnnnnnnnnnnnnnnnnnnnnnnnnnnnnnnnnnnnnnnnnnnnnnnnnnnnnnnnnnnnnnnnnnnnnnnnnnnnnnnnnnnnnnnnnnnnnnnnnnnnnnnnnnnnnnnnnnnnnnnnnnnnnnnnnnnnnnnnnnnnnnnnnnnnnnnnnnnnnnnnnnnnnnnnnnnnnnnnnnnnnnnnnnnnnnnnnnnnnnnnnnnnnnnnnnnnnnnnnnnnnnnnnnnnnnnnnnnnnnnnnnnnnnnnnnnnnnnnnnnnnnnnnnnnnnnnnnnnnnnnnnnnnnnnnnnnnnnnnnnnnnnnnnnnnnnnnnnnnnnnnnnnnnnnnnnnnnnnnnnnnnnnnnnnnnnnnnnnnnnnnnnnnnnnnnnnnnnnnnnnnnnnnnnnnnnnnnnnnnnnnnnnnnnnnnnnnnnnnnnnnnnnnnnnnnnnnnnnnnnnnnnnnnnnnnnnnnnnnnnnnnnnnnnnnnnnnnnnnnnnnnnnnnnnnnnnnnnnnnnnnnnnnnnnnnnnnnnnnnnnnnnnnnnnnnnnnnnnnnnnnnnnnnnnnnnnnnnnnnnnnnnnnnnnnnnnnnnnnnnnnnnnnnnnnnnnnnnnnnnnnnnnnnnnnnnnnnnnnnnnnnnnnnnnnnnnnnnnnnnnnnnnnnnnnnnnnnnnnnnnnnnnnnnnnnnnnnnnnnnnnnnnnnnnnnnnnnnnnnnnnnnnnnnnnnnnnnnnnnnnnnnnnnnnnnnnnnnnnnnnnnnnnnnnnnnnnnnnnnnnnnnnnnnnnnnnnnnnnnnnnnnnnnnnnnnnnnnnnnnnnnnnnnnnnnnnnnnnnnnnnnnnnnnnnnnnnnnnnnnnnnnnnnnnnnnnnnnnnnnnnnnnnnnnnnnnnnnnnnnnnnnnnnnnnnnnnnnnnnnnnnnnnnnnnnnnnnnnnnnnnnnnnnnnnnnnnnnnnnnnnnnnnnnnnnnnnnnnnnnnnnnnnnnnnnnnnnnnnnnnnnnnnnnnnnnnnnnnnnnnnnnnnnnnnnnnnnnnnnnnnnnnnnnnnnnnnnnnnnnnnnnnnnnnnnnnnnnnnnnnnnnnnnnnnnnnnnnnnnnnnnnnnnnnnnnnnnnnnnnnnnnnnnnnnnnnnnnnnnnnnnnnnnnnnnnnnnnnnnnnnnnnnnnnnnnnnnnnnnnnnnnnnnnnnnnnnnnnnnnnnnnnnnnnnnnnnnnnnnnnnnnnnnnnnnnnnnnnnnnnnnnnnnnnnnnnnnnnnnnnnnnnnnnnnnnnnnnnnnnnnnnnnnnnnnnnnnnnnnnnnnnnnnnnnnnnnnnnnnnnnnnnnnnnnnnnnnnnnnnnnnnnnnnnnnnnnnnnnnnnnnnnnnnnnnnnnnnnnnnnnnnnnnnnnnnnnnnnnnnnnnnnnnnnnnnnnnnnnnnnnnnnnnnnnnnnnnnnnnnnnnnnnnnnnnnnnnnnnnnnnnnnnnnnnnnnnnnnnnnnnnnnnnnnnnnnnnnnnnnnnnnnnnnnnnnnnnnnnnnnnnnnnnnnnnnnnnnnnnnnnnnnnnnnnnnnnnnnnnnnnnnnnnnnnnnnnnnnnnnnnnnnnnnnnnnnnnnnnnnnnnnnnnnnnnnnnnnnnnnnnnnnnnnnnnnnnnnnnnnnnnnnnnnnnnnnnnnnnnnnnnnnnnnnnnnnnnnnnnnnnnnnnnnnnnnnnnnnnnnnnnnnnnnnnnnnnnnnnnnnnnnnnnnnnnnnnnnnnnnnnnnnnnnnnnnnnnnnnnnnnnnnnnnnnnnnnnnnnnnnnnnnnnnnnnnnnnnnnnnnnnnnnnnnnnnnnnnnnnnnnnnnnnnnnnnnnnnnnnnnnnnnnnnnnnnnnnnnnnnnnnnnnnnnnnnnnnnnnnnnnnnnnnnnnnnnnnnnnnnnnnnnnnnnnnnnnnnnnnnnnnnnnnnnnnnnnnnnnnnnnnnnnnnnnnnnnnnnnnnnnnnnnnnnnnnnnnnnnnnnnnnnnnnnnnnnnnnnnnnnnnnnnnnnnnnnnnnnnnnnnnnnnnnnnnnnnnnnnnnnnnnnnnnnnnnnnnnnnnnnnnnnnnnnnnnnnnnnnnnnnnnnnnnnnnnnnnnnnnnnnnnnnnnnnnnnnnnnnnnnnnnnnnnnnnnnnnnnnnnnnnnnnnnnnnnnnnnnnnnnnnnnnnnnnnnnnnnnnnnnnnnnnnnnnnnnnnnnnnnnnnnnnnnnnnnnnnnnnnnnnnnnnnnnnnnnnnnnnnnnnnnnnnnnnnnnnnnnnnnnnnnnnnnnnnnnnnnnnnnnnnnnnnnnnnnnnnnnnnnnnnnnnnnnnnnnnnnnnnnnnnnnnnnnnnnnnnnnnnnnnnnnnnnnnnnnnnnnnnnnnnnnnnnnnnnnnnnnnnnnnnnnnnnnnnnnnnnnnnnnnnnnnnnnnnnnnnnnnnnnnnnnnnnnnnnnnnnnnnnnnnnnnnnnnnnnnnnnnnnnnnnnnnnnnnnnnnnnnnnnnnnnnnnnnnnnnnnnnnnnnnnnnnnnnnnnnnnnnnnnnnnnnnnnnnnnnnnnnnnnnnnnnnnnnnnnnnnnnnnnnnnnnnnnnnnnnnnnnnnnnnnnnnnnnnnnnnnnnnnnnnnnnnnnnnnnnnnnnnnnnnnnnnnnnnnnnnnnnnnnnnnnnnnnnnnnnnnnnnnnnnnnnnnnnnnnnnnnnnnnnnnnnnnnnnnnnnnnnnnnnnnnnnnnnnnnnnnnnnnnnnnnnnnnnnnnnnnnnnnnnnnnnnnnnnnnnnnnnnnnnnnnnnnnnnnnnnnnnnnnnnnnnnnnnnnnnnnnnnnnnnnnnnnnnnnnnnnnnnnnnnnnnnnnnnnnnnnnnnnnnnnnnnnnnnnnnnnnnnnnnnnnnnnnnnnnnnnnnnnnnnnnnnnnnnnnnnnnnnnnnnnnnnnnnnnnnnnnnnnnnnnnnnnnnnnnnnnnnnnnnnnnnnnnnnnnnnnnnnnnnnnnnnnnnnnnnnnnnnnnnnnnnnnnnnnnnnnnnnnnnnnnnnnnnnnnnnnnnnnnnnnnnnnnnnnnnnnnnnnnnnnnnnnnnnnnnnnnnnnnnnnnnnnnnnnnnnnnnnnnnnnnnnnnnnnnnnnnnnnnnnnnnnnnnnnnnnnnnnnnnnnnnnnnnnnnnnnnnnnnnnnnnnnnnnnnnnnnnnnnnnnnnnnnnnnnnnnnnnnnnnnnnnnnnnnnnnnnnnnnnnnnnnnnnnnnnnnnnnnnnnnnnnnnnnnnnnnnnnnnnnnnnnnnnnnnnnnnnnnnnnnnnnnnnnnnnnnnnnnnnnnnnnnnnnnnnnnnnnnnnnnnnnnnnnnnnnnnnnnnnnnnnnnnnnnnnnnnnnnnnnnnnnnnnnnnnnnnnnnnnnnnnnnnnnnnnnnnnnnnnnnnnnnnnnnnnnnnnnnnnnnnnnnnnnnnnnnnnnnnnnnnnnnnnnnnnnnnnnnnnnnnnnnnnnnnnnnnnnnnnnnnnnnnnnnnnnnnnnnnnnnnnnnnnnnnnnnnnnnnnnnnnnnnnnnnnnnnnnnnnnnnnnnnnnnnnnnnnnnnnnnnnnnnnnnnnnnnnnnnnnnnnnnnnnnnnnnnnnnnnnnnnnnnnnnnnnnnnnnnnnnnnnnnnnnnnnnnnnnnnnnnnnnnnnnnnnnnnnnnnnnnnnnnnnnnnnnnnnnnnnnnnnnnnnnnnnnnnnnnnnnnnnnnnnnnnnnnnnnnnnnnnnnnnnnnnnnnnnnnnnnnnnnnnnnnnnnnnnnnnnnnnnnnnnnnnnnnnnnnnnnnnnnnnnnnnnnnnnnnnnnnnnnnnnnnnnnnnnnnnnnnnnnnnnnnnnnnnnnnnnnnnnnnnnnnnnnnnnnnnnnnnnnnnnnnnnnnnnnnnnnnnnnnnnnnnnnnnnnnnnnnnnnnnnnnnnnnnnnnnnnnnnnnnnnnnnnnnnnnnnnnnnnnnnnnnnnnnnnnnnnnnnnnnnnnnnnnnnnnnnnnnnnnnnnnnnnnnnnnnnnnnnnnnnnnnnnnnnnnnnnnnnnnnnnnnnnnnnnnnnnnnnnnnnnnnnnnnnnnnnnnnnnnnnnnnnnnnnnnnnnnnnnnnnnnnnnnnnnnnnnnnnnnnnnnnnnnnnnnnnnnnnnnnnnnnnnnnnnnnnnnnnnnnnnnnnnnnnnnnnnnnnnnnnnnnnnnnnnnnnnnnnnnnnnnnnnnnnnnnnnnnnnnnnnnnnnnnnnnnnnnnnnnnnnnnnnnnnnnnnnnnnnnnnnnnnnnnnnnnnnnnnnnnnnnnnnnnnnnnnnnnnnnnnnnnnnnnnnnnnnnnnnnnnnnnnnnnnnnnnnnnnnnnnnnnnnnnnnnnnnnnnnnnnnnnnnnnnnnnnnnnnnnnnnnnnnnnnnnnnnnnnnnnnnnnnnnnnnnnnnnnnnnnnnnnnnnnnnnnnnnnnnnnnnnnnnnnnnnnnnnnnnnnnnnnnnnnnnnnnnnnnnnnnnnnnnnnnnnnnnnnnnnnnnnnnnnnnnnnnnnnnnnnnnnnnnnnnnnnnnnnnnnnnnnnnnnnnnnnnnnnnnnnnnnnnnnnnnnnnnnnnnnnnnnnnnnnnnnnnnnnnnnnnnnnnnnnnnnnnnnnnnnnnnnnnnnnnnnnnnnnnnnnnnnnnnnnnnnnnnnnnnnnnnnnnnnnnnnnnnnnnnnnnnnnnnnnnnnnnnnnnnnnnnnnnnnnnnnnnnnnnnnnnnnnnnnnnnnnnnnnnnnnnnnnnnnnnnnnnnnnnnnnnnnnnnnnnnnnnnnnnnnnnnnnnnnnnnnnnnnnnnnnnnnnnnnnnnnnnnnnnnnnnnnnnnnnnnnnnnnnnnnnnnnnnnnnnnnnnnnnnnnnnnnnnnnnnnnnnnnnnnnnnnnnnnnnnnnnnnnnnnnnnnnnnnnnnnnnnnnnnnnnnnnnnnnnnnnnnnnnnnnnnnnnnnnnnnnnnnnnnnnnnnnnnnnnnnnnnnnnnnnnnnnnnnnnnnnnnnnnnnnnnnnnnnnnnnnnnnnnnnnnnnnnnnnnnnnnnnnnnnnnnnnnnnnnnnnnnnnnnnnnnnnnnnnnnnnnnnnnnnnnnnnnnnnnnnnnnnnnnnnnnnnnnnnnnnnnnnnnnnnnnnnnnnnnnnnnnnnnnnnnnnnnnnnnnnnnnnnnnnnnnnnnnnnnnnnnnnnnnnnnnnnnnnnnnnnnnnnnnnnnnnnnnnnnnnnnnnnnnnnnnnnnnnnnnnnnnnnnnnnnnnnnnnnnnnnnnnnnnnnnnnnnnnnnnnnnnnnnnnnnnnnnnnnnnnnnnnnnnnnnnnnnnnnnnnnnnnnnnnnnnnnnnnnnnnnnnnnnnnnnnnnnnnnnnnnnnnnnnnnnnnnnnnnnnnnnnnnnnnnnnnnnnnnnnnnnnnnnnnnnnnnnnnnnnnnnnnnnnnnnnnnnnnnnnnnnnnnnnnnnnnnnnnnnnnnnnnnnnnnnnnnnnnnnnnnnnnnnnnnnnnnnnnnnnnnnnnnnnnnnnnnnnnnnnnnnnnnnnnnnnnnnnnnnnnnnnnnnnnnnnnnnnnnnnnnnnnnnnnnnnnnnnnnnnnnnnnnnnnnnnnnnnnnnnnnnnnnnnnnnnnnnnnnnnnnnnnnnnnnnnnnnnnnnnnnnnnnnnnnnnnnnnnnnnnnnnnnnnnnnnnnnnnnnnnnnnnnnnnnnnnnnnnnnnnnnnnnnnnnnnnnnnnnnnnnnnnnnnnnnnnnnnnnnnnnnnnnnnnnnnnnnnnnnnnnnnnnnnnnnnnnnnnnnnnnnnnnnnnnnnnnnnnnnnnnnnnnnnnnnnnnnnnnnnnnnnnnnnnnnnnnnnnnnnnnnnnnnnnnnnnnnnnnnnnnnnnnnnnnnnnnnnnnnnnnnnnnnnnnnnnnnnnnnnnnnnnnnnnnnnnnnnnnnnnnnnnnnnnnnnnnnnnnnnnnnnnnnnnnnnnnnnnnnnnnnnnnnnnnnnnnnnnnnnnnnnnnnnnnnnnnnnnnnnnnnnnnnnnnnnnnnnnnnnnnnnnnnnnnnnnnnnnnnnnnnnnnnnnnnnnnnnnnnnnnnnnnnnnnnnnnnnnnnnnnnnnnnnnnnnnnnnnnnnnnnnnnnnnnnnnnnnnnnnnnnnnnnnnnnnnnnnnnnnnnnnnnnnnnnnnnnnnnnnnnnnnnnnnnnnnnnnnnnnnnnnnnnnnnnnnnnnnnnnnnnnnnnnnnnnnnnnnnnnnnnnnnnnnnnnnnnnnnnnnnnnnnnnnnnnnnnnnnnnnnnnnnnnnnnnnnnnnnnnnnnnnnnnnnnnnnnnnnnnnnnnnnnnnnnnnnnnnnnnnnnnnnnnnnnnnnnnnnnnnnnnnnnnnnnnnnnnnnnnnnnnnnnnnnnnnnnnnnnnnnnnnnnnnnnnnnnnnnnnnnnnnnnnnnnnnnnnnnnnnnnnnnnnnnnnnnnnnnnnnnnnnnnnnnnnnnnnnnnnnnnnnnnnnnnnnnnnnnnnnnnnnnnnnnnnnnnnnnnnnnnnnnnnnnnnnnnnnnnnnnnnnnnnnnnnnnnnnnnnnnnnnnnnnnnnnnnnnnnnnnnnnnnnnnnnnnnnnnnnnnnnnnnnnnnnnnnnnnnnnnnnnnnnnnnnnnnnnnnnnnnnnnnnnnnnnnnnnnnnnnnnnnnnnnnnnnnnnnnnnnnnnnnnnnnnnnnnnnnnnnnnnnnnnnnnnnnnnnnnnnnnnnnnnnnnnnnnnnnnnnnnnnnnnnnnnnnnnnnnnnnnnnnnnnnnnnnnnnnnnnnnnnnnnnnnnnnnnnnnnnnnnnnnnnnnnnnnnnnnnnnnnnnnnnnnnnnnnnnnnnnnnnnnnnnnnnnnnnnnnnnnnnnnnnnnnnnnnnnnnnnnnnnnnnnnnnnnnnnnnnnnnnnnnnnnnnnnnnnnnnnnnnnnnnnnnnnnnnnnnnnnnnnnnnnnnnnnnnnnnnnnnnnnnnnnnnnnnnnnnnnnnnnnnnnnnnnnnnnnnnnnnnnnnnnnnnnnnnnnnnnnnnnnnnnnnnnnnnnnnnnnnnnnnnnnnnnnnnnnnnnnnnnnnnnnnnnnnnnnnnnnnnnnnnnnnnnnnnnnnnnnnnnnnnnnnnnnnnnnnnnnnnnnnnnnnnnnnnnnnnnnnnnnnnnnnnnnnnnnnnnnnnnnnnnnnnnnnnnnnnnnnnnnnnnnnnnnnnnnnnnnnnnnnnnnnnnnnnnnnnnnnnnnnnnnnnnnnnnnnnnnnnnnnnnnnnnnnnnnnnnnnnnnnnnnnnnnnnnnnnnnnnnnnnnnnnnnnnnnnnnnnnnnnnnnnnnnnnnnnnnnnnnnnnnnnnnnnnnnnnnnnnnnnnnnnnnnnnnnnnnnnnnnnnnnnnnnntttcttaggagaagcagctattagttctctaatatactactacgtatactactgtctctatttcctgatcctccattatatacagcattcccttaggcattctatacctaggggtcttacagtgatcctatacgggctctggcctattacagtactaagtcctttatatacttagattttgtcacggataactttgtgcgctactatatatattggtcctgggcatgtcagagcgagagctctgacataatggtcttttggctgagcggaagaatgtgcgcccaggcatatcctttacagatttaaacccttatatatactcttaattatatataataactaatagactattaatctattaataaaggaaggagtattaatatatataaagctttactatatagatattaatagatattagttaaaataagaagttaatattagataggttaatatagattagattctaactaatagaaatacctactaatagtctaataaaagctttaccctattagaaataagaatagtttagggaattacttagaatatctaagattaattatctaattagttataannnnnnnnnnnnnnnnnnnnnnnnnnnnnnnnnnnnnnnnnnnnnnnnnnnnnnnnnnnnnnnnnnnnnnnnnnnnnnnnnnnnnnnnnnnnnnnnnnnnnnnnnnnnnnnnnnnnnnnnnnnnnnnnnnnnnnnnnnnnnnnnnnnnnnnnnnnnnnnnnnnnnnnnnnnnnnnnnnnnnnnnnnnnnnnnnnnnnnnnnnnnnnnnnnnnnnnnnnnnnnnnnnnnnnnnnnnnnnnnnnnnnnnnnnnnnnnnnnnnnnnnnnnnnnnnnnnnnnnnnnnnnnnnnnnnnnnnnnnnnnnnnnnnnnnnnnnnnnnnnnnnnnnnnnnnnnnnnnnnnnnnnnnnnnnnnnnnnnnnnnnnnnnnnnnnnnnnnnnnnnnnnnnnnnnnnnnnnnnnnnnnnnnnnnnnnnnnnnnnnnnnnnnnnnnnnnnaaatagatatataataatatagatattccttcctaagcctatataggcttatatatattttcctcttatatagaccattatctgttatatactagtaatatattatttagtaataataaagactagaaaagtttagaaggatatatttataaactttatagtaatctaattaattaaaaagtatttaaataaaagatagttactactttaactactaaaactaagcttctagtacttactaaagctagaaaaatagtctaatagtaatactaagtcctttatatacttagatttaaacccttatatatactcttaattatatataataactaatagactattaatttattaataaaggaaagagtattaatatatataaagctttactatatagatattaatagatactagttaaaataagaagttaatattagataggttaatatagattagattctaattatagaaatacctactaatagtctaataaaagctttaccttactaaaaataagaatagtttaaggaattacttagaatatctaagattagttatctaattagttataaaagtagatattaaagaaaattttattaattaaagatagctcttaaagctctaaattataattactttaaaagctagggggtatattagaatctaggataaatactattattttttatccttaatatagttaggttatataactaactaggctagttttctatagaaaaactaacttagatggttttctgcctaaaaaaccagtcctacagtttttcgcccaaaaaacatcctttcattttattttatttatttgattactaagatatctattagattatcatattttagtacaactaccatttgtgccggcgccgccggattcggccgccccctcgatcgggtttggcgtccgtcccgtttgggtttggtctatcccaattcggcttggcgtctacgcttttcccaaattggcagaagcacagcccgctcctgttctggttaagtagctccagaagtagtttggcgcccgggctatccctaaactggtatctgccattcccgaccgcctaccagccttatccttgaactatataacttccagtgcgtcgcttgatcatcctcctctctctgactgactacaccatttcctcccccgtcattcctagccgtgaaatgataccgtaattccggatcgtacggtattcttccccctgtgcctccctgtttcagctgggttcctcgttatcgcctgtgcccctttctccactcgactcgctatagatagatctatctattggccctagtcgccctaatccttaaattagaccgctgcactgcaaccctataatttgaatttagacgacatcttatatacttaccctttagtccctgtttcttcgttgtatccgctataacggtatagccttttataatcggcctagggagagagccttaacttgcgaagagattcgatttatgacctagccggttgagcacaattgtgacgcggcgctctctgagctagtgctaatcacaatatctcgctatacctatgtatctattggcacttactactcttacgccccacctataacgaagaatatctcagtcctagattcttttttgtaaaggcttcgacttttggtagccgtgaataggctaacgtcactgagtggataacctagacgccagtatctacgccgagtaatcttctgtagacgaccttagcacaatttacttttctagcgaggcgtagtaaagaagactgaggaatctagactatcggaggttcctaggatggtcggtatcactgtacgcatgataatatcttacccgactggacgctgatacctatactaaacaccctttcggagacgattccttcactataatcctcttctagtaaggtgtaatagggtagactgtaaacttatctaagtataaaacactttaatctaataggagaaatgctatatacagtgtcggccttacgtatgactccttgtgaattccgttatagataggttggtggatcctcgtattagcaggctgcgctttatcttacgactcttctccattcgacctgcctaaagcgctcggaagaggtaagggaaagtaggtaggtataaagggttgttagaaatccttactaggaccgagaaggaggttgactatctatttataattctttctcttctattctgatatattgcgtctatatctttcttatagtatagtaccgatcaatctagacaatatgatctattatcgtctgcctactaaaaaaccatattttaacctattctaggcactcggttcctacgattgtatccatttacagatacctttagatagacctacgccggcctatctatttctatctagctagtacaggtattcgagtcttctattcttagggtatacgctataccttcaaagtcatttctatatacctagtgaagtcgagataatattagcccctaataagtttacagaagaagtaactattaatagctcgaatgagtttaatatggatttcttaagtacctccttaggaagagatacaaacgttgctatatcaaatatatatatagcaagtcgagaattgctaaatgatatttctagtagtgatttagggtaaggttctaattagtattataatggtacgtggtggctattattttgactccccttagtttcttcaattcactctattaaacttattataccctatctctctttccttactaataaagtagtcgataattgagggcttacttaatactttaagaccagacttctaaggtaataagcattataagagcaatatgatatcttcttcctaagatattatctaggggggaggtcttaagcaatctatacctttatactctatatcggtcggtaatagcctctgtatcctagtagcagaggaagaatttctaagttaaacgaaaatatataaaaatacaggtcagtggtctctcagttagctaggttacccagtcctctagcttacgtagtagaatatagacgaagctataatagagggagacattttactacattcgaacctgataatagatatagtagacagtaataaaatagttaatagctaagttcttgaccctacgggctaggaaaagtaatctactctaacagatttattacctagagatactagaattaaagtagacgaattaggatcgaaaccggcagcttatgtcattgggaaaagcatgccagccaagaagtataacagatatcctatttccgaaagctatatggttattagccaagagaaagacagggctgcagtttataataacaaaggcgagctacagcgttgtgatacagagagcctgttagtatctccaaaatttcgttaaaatggaacattagcgcgttcaatcttacctatattctaagacagtaaaaagcagtcgctatatagcctaacagaggaagttataggattttatccagtattagattaggctccagttttagaccagctttcggttattatccctaactgccgttcctaagagcgaggaacgaataactctatcttaataatacgaatagcctctttaaacaggaagcgggactaggataagtatatatctgataacagtagcaatgacccttatggccccgacgatacagactatgtaggcgaaagtggtaaagacatatatagaaatagcattcctttctatcgactaaaaagagtaaggcgacctaccgtacagcttaagcctagacctccccggcagaacactaaacgtctcttagtcgacgaggcagttcaatttaaagtagccgtagatcagtcttccccaataagcttatataatatcgaaacgattcctatccgaggtttccttacgcgatagatacttttattaagggtcatctattcagttacctttaaagagtaggtagagtattcctactcttagagatcaggtagagctacttcacactataaaaacaaaattggcagccagcattctaagcaaccccctcagaaagggtcctgcgctaggaaaacgaccgggccaacccgattcctatctaaggacgaccaacttttgattgaattgaaggaagagcagagcctgccatagaagcgaatcgcacagtattttcctagaaggtcggtaggctccctctaggtacactattccacacgacttaagggccataaggctagaaattctaggtattctgggcagagttctaacgtaaggagcgaatctttatatagaggcgcaccttgcgaggtagtttaagccgcgggtagcaagagtaaaggcaccgaagaaggtatgttaagaccgcgatacggtctacctcggcgcaggcaaacggtagaccgctattccccggtttgagttggcagtagttattagactttatcgaatatcagtcaaacggatcgccaaaaataagaccgtcccgctgggtctagcgcccgtagtgcattgggcaacagttgaatcttaccaggtttcacagtttcgaagagcggcaatggtctctccgcagagtcgctaagccgctctggcaatgaaacgcagttttaatctcactttttgctattggcgacactgctttcgactgtaatgtgagtcttacaaacggcggacctgtgaattactagatccggttagttttgccttttagggtttagagccccaatacgctgtcacgtaacctaccttcaacgccgctgacttaaaagaaaaggtggcgccgtttcccgacatcccacatatagacgggttgttccagctgctgcccaactttgcagaccgccgtcggactcagcgtcggatgtgttagtgctctgtcactccagagagagattttgtaattcaccgccatccaggaattgacggccttcccttggttacttttggccttgggctgtagttacctacgaatgacaggcttgagcaatatttctccaaaattgaccaatagatattagcgtctttaagttcaagccggaacaaggcaccccgtgaggtgtgataataacggcaccttagcgaatcaattaggtatgaagcggtgttgaagcgaagggagtgaaacccgcgagggtcctccactatgagttcttgcagaaagggagtggaccagatgtgtagactagacttgtgacattcaaactagatttctggcgtgaatacaaaggtattgccccatgtagcaaattggggttggtgagcagatttgtctagagagcccatcatgcaatcactcagcccaagaacctccaaggtttcttttacggactaaattcaacgctcggagtctgagtatggacctcggcgcaagtttatttcccatcggggcattgcaagaaaccgcccggcactgcaccctcatgggtcatcaagccacagtagtaggccaatgggtgaccatcaacaccttgcgccttgccattgtagtaaaatacgacgcgctcgtccccgtatttcttattgttcttgccaccgttgtaaggcccgttcttgacgagcggatactcctttcgattctggtcgtgctcggggcagtgagcagggaagtgcagctgcacattcttgctgttatcattatcgaacgggtgcgggtagttcttcgcgcctcgcgtctcaggagggtccagcatgcccaggttcacggcgtgctgcgtggcaaggtagatatcgtgtccgtcataagtgttcttgccgcacttgatggatgcagaggcgttgggaccatcccactaaaagagatatcagtcagaattggaaggtttcaatttaatggagtgatgacgtacgttaatgggtgcgttggaaggttccccacgctcttgaagatcagcaaagtcatcggccgaaagggccgaggcgaggctcaagaagaggatggaggcggttgccaatgtgaacttcattgttgcggttggacgattggagtagaaaaagattgctggaggattgaagttgaactgttgatgctaagatgaggtctgagtgcttgctgctggattttagagccggcaaaggctcttttatgccattgatggagtcacctaggcttcacctaggctgattgagagccttgcactagcagggacggacatacagaatctacctgttgaagcgtcgattggctcacagaggagctgatatcgcgcgacaattgggggcaattctacattgtgatgcaatgatttccttgtttggaggctttttagtaggactgttagtagtggaatccttcaaaccggtaaagttcgctttgcatacatgcgactagggcgagtgctccaaagcaagcttgaagcggaagacaatgactttgcctactctcactgtgacaagaaagtctccatttccctcgcaactgcgtatagaatagagcaattggagtgttgaagttccaatgctgatggagcttatcggtgtaagctactctaaagccctgtaaatcgtactgcatatagcatttgaccactctcgtctttcggaccctgcgcatggacatcgttcatttgtacacaaggctgggaggattctattgggggccgtcagccttgagaccaaaactggccccatcttccctagtggatataatgtccagtgacgtcaatccgcatgtccatccgcctgttgaactggtcgggtctcggcgtgacagatgctccgacagaatcatatcgtctttgcataccaggcttctcatcttttaggtaatatcgtctcgactcaagacgctattgatgcggttgactggatcaagctgcttggcggcgccaaagtctcttccctgaattgagcacgattttatgttgcgccttttcggccaagaaaaacagttgttccactcgacgaaatcagttgttgttgtatcgggcattttgctctaatcggtgcggcttaattgtcaaccccacgttcctggttgatcggcagattagtcatgatgggcagccttatgatgtcactgtacagggctattgttgcaacaggacggaggattacactgcgcctcgatcaatatcagggtagttgtgtgactctttggacttttgctgcctagttgccactcttgaaagtttccgatattgcgaccactccgcactttctttcctcgaacataacgcaactaacacatccttcgtctcagcagcgcagcgtagtgactgctcatctctcaaacactcaaagtcccaaaatttattccttcaagagccctcgcgctctgtcatcatgaacaccagcattcaagaaatgacgtgcaaatcgattgagctcgacggctttggctctgccgccgatgacgcttggttcgatcaacatactgcacccatggacggcgaggaagagaccggggtgcatccgtatcaagctgcggctctcaaagcgtacctcaaaggcgactccaagccatccgagacagctgccgccctgaccaagccacatgactccgagaagaagaccgacctgcgagaccgcatagtgggcatactcgaagacgcactttttgagctgcctgaaagccacacacccgctcttgtcgacctgctcaaagaacttagccaactgccagacgaagaggacggcgaacctgtctggaaaggtctcaaaagtttcggccactcatgggcagatggatggaagcagagccactggcgcaaagcgttggcaacgcgggatccagccacaagagcgaagaggcgtgaggctcacgtgcaccaggcctttgtggaggcgtcttgtgcaatggctgctccgggaccgaatgctgaagatggtcttttgccactaagctggggctatgagtgcatctccgaagcgctcgaatgccaagatgcattgtgggactttgaggtacctgctgcggcagtgtggatcaaggtagctggagaaagactcagagagagcgcgaagaaaggtgagaagtcctgggcgttggagagagaggggaggctttggacggcggggccgatgagcatggatcggtggaaattctggttgcaaagactcgaggagattgagaagattggcaaggtcatctcgtcaacggcgagtgaaggtctgcgggatgctcgagcccagtctaaggagtagttgatgactatgcctaaacacttagcgttagagtagcagtctggattgttaatttgcttccagacggccttgatggcaaattgaacatgtgctaggcttgtgccctgagagtcgttgataaagtcggattccagctaacaggctagaagaccgattataagatcacacattgcccaccccatgactcccaagccattagccccttataaatcgaagatccgatcgaagttctctgcctaaacaatgttgaatgtcagaatagttcggcaagggtcatgcgatcgactgacatacgatatccaatctccggggccagatttgctatcggcgcggtacagatccggatcctgatgatagcagatcagaaggcgtataaggggactcgtaggggtttggaatcatccccgacgcacaacatcgatagtttggtcggccatgtccaaaggcacgctcgcagctgacagcggggaagcgtcaaggaggcttgaatggtgggaacataacgagatataaagacaggtacagacttccttggttggtgggtgatgccaaaatcacgggatggattcccgtcatccgcgtttgattctaggtttgggggaggggaacagagtttatctgtcctctctatcgcccacgaaagacgcttgatcaaatttggcagcttgctgggtggcatggacgacattttgtagtcgatttctgttataattttagcattattctcctgtgcatgacatggcgttgtttataacttacctttgcttcttcgttccatcatctgttgatcatcacactctgtggcatgacttttttcttccgttggtaaactttgttctgtacgtatccgtttgcgtcgcgccatattctcttgttcttccacgctgattgattgatctataattttgacaagttcttggaactgttcgcaaggttttaagggttcggccgacacttcagagtagagcggtgaaagtcgatgatcaaagcacgcccaagctcttcactccaatggacattgtctcgcctaaggtcttcatgtattatcctgagggctttgatttccttgttcaaatttgtgaatttaacgctgtaccccctccccccagatatcacgagtgatctgaaggtgtagacgtaacgttaactaacgcagtggtctatgggtctcggggccgtcataagcagacagcagtggagctagacaggagcttttttctgctcttccccaccccgacgcgatgaccatgccgcatgttgccagaggtgggttcaagagcccgagggcgctttaaccatttcacttcctccaggtcaatgacaaacaaacgaatacccaggtcatcccacagcatgttgcgccactcactgtcgccatggacaactccatgtgaccggagcacggtcagagctttgtcgcgctctaggtgaaagaatctggaattctcatcgttgataacatgctgaagacgttttccagcccagctcagtatcatcatctacgccattaattcgccatggtaccaatatgagactcgtggcgtgaaagtcccaagacagacggggatctgatttccttgcaggctcctgaggtgacgataattgtttgcctctgctttaatgagatgctgcttgtccgccgtggtagccttgattatcacagtgtatccgtgcgatagaagagtcgctttgataaggtaacccgtccgaccacagacgtgaagttgctcaaacccgtgatttcggtttcgggaaagttgatggtgaagccggcgtgtgaactcctgcggtcccacggagtgtctttggccaccgtggagtttccagttggggcattctttatccagaggatctcggttggccataccgcggatgcaggcaatagtgcaatatggtcgcgcggattgccctactttttgagaagtctgtttattgttccggccggcttgtgtcctttcgctttccttagtcgattgacgattgttacctcgactgcggctcgacctgctgcgcgccgctgctgcgatggatggcgaatgcgattcttcatcactgccgctgccttcggtcgacgaatgcttcggagtagacatgcctggttggcagcgagaacgggatcgtgtattgtgtgtcttcggctctggtttccagtgcgagggtcaataattggaggctcgcgggtctttacgaagcgtttcgggaatttttctcaaaacgtcctggtattcgacctcccaggtctttagtctatcgtgtgccgcatcatgccattcttgagatagatcttcggcggccagcgcttgaagggtaaatgcaagcacctgaccgatggcggtccggtagaggcgccaatcatcgtccgcctgcacgtcctgattcgggatacacaagaaatattgaacaactgtggggtcatcattcggaatatagagaaaaacaaaagcctcccccgtgcagatgtagccgtattgaaccccactgtcgatcatatataagaatatctgagtaaccactgcggcaacgaggtaggtggcataaaactcaaacgtatcgccttcctggtcaatgacatcgcgagccagatccatttggtgtagacccgccaccaattcagggattgtcaccttatacggcgctttgaactccactgcatacaccggtttttatcgttcatcagccacaaggtacacgcagaactggtcggcgcgccgattgcgtcttcgtgtagtgccatccctcttctatccctgcgccactcctctccccattcctctgcctcttccatgcctagtgttcgccactcgttggggtgtccgcgtgccctgaaggttcatttgctccaggctcttctccaaagaggtttccgatgggtttgcgcggtcgtagaaggtaactcggccttggattccaaactcatatcgaaggggttcatcatctcgcaaagccataatggcctgtggcataaaactcaaacgtatcgccttcctggtcaatgacatcgcgagccagatccatttggtgtagacccgccaccaattcagggattgtcaccttatacggcgctttgaactccactgcatacaccggtttttatcgttcatcagccacaaggtacacgcagaactggtcggcgcgccgattgcgtcttcgtgtagtgccatccctcttctatccctgcgccactcctctccccattcctctgcctcttccatgcctagtgttcgccactcgttggggtgtccgcgtgccctgaaggttcatttgctccaggctcttctccaaagaggtttccgatgggtttgcgcggtcgtagaaggtaactcggccttggattccaaactcatatcgaaggggttcatcatctcgcaaagccttaatggccttttcgacaaagttatccaccgtgtctcgctcaaaattccgaagagacgcttccgaatagatcggcctgttctggacattcgtaaggacataatcaatttgggtatcagaagggaatagtgggcgcgaggtaaaggcaccggtgcggtcgaatttcctccagattttctcttggagttgggggaaatcaagccaagggacaacgcgcttggggtaaagtcggttgacggggtcagtcgcgtcgccctgggtcgtgagagtcgcatccgtctcaacccgaatcgcttgagacagagagttgtggcagcgatcgaggaggcggaatagtgtgttgggttcgagtcgccgttcagcctctccctggaggcgctctgcttcttctcgcgcctgtctctcttcctcttcacggcgctgtgcctcttctcgtgcctgtctctcctcctcaagctgacgtcgtagttcagcgattgtttcttccatcgcttgttgaaatcagtattcagcagataatcgaatgatgcaaatcgaagtctacatagtagggggttcgctgtctggcgcgggggagtggcccgtcagggcggaatgcgtccagatgttttaccagcttactcacccccttggctcgagtcgattcatgcctcaggcacaaaataccttagccttttgatatgctgacgttcaaagtcctttgttttctagaatatacgtcgattcggtggtctcggattacctagactggcctcgccagtaaatttataaatatagttctacttaaattcctcagcaagtacagtcaccgtggcgaggtcattatcttgactacatcactcgcgagaccccgttttccgttctttcctgttgcgaaggatatattgtgtgatctcgctgtgggtaaggcattcgacaaagctaataagcagcgaaaactcttctgatataaatggaataggtttacctctctcaatctccgtctgttctgcggaacacccttctgtatgctcttagttttgggattagacgtcacgcagtcaatcgccatatggacctcatcgaaagcaaagagacgtacctttcctgtctgggcacttgaatctctcgtcaggaataggctgtatgggcgagacaaactgagctgcctttactgacaaaacctgtaacggtcagttgctaaataatgctgggagagctgacgtctgacgaggtatttatatagattttgattgagtttccaggtttgggtgggcgttgatggcaaatctgatgggcacgatcaagcttcccagcagaaaaaggaatgtaaagtcgatggcatgattcttcggatcaaaaaatgactttgttcaccatcaattgaaccttgttggaacaccctcaggttaaagcagccgcactatatgtctcattttcaatacccttgcgtaagtgccgcagagttctgctctcacgataagctgatataaacagataagaaagtaaaatcaaaactggccgctactgggttgtccaagcttgaaaatttgtcgttttcattcttacccccccaaaaaacatcattctttcaagcatgattcgattgcgcatcttgcaagtcagaaaacaaatgtcgcatattgcaatattgtttaggcaaccgtttcaatttttttttaggtaatttatgttgagaagacggtctctatctatgcttgcaaatgacaagacactgcttctaagagtagtaaataccgtgcgtataatgcataacagatgtttgaaaagtaccccacaagtatacaggagtgtgtatgtgtgtatgtgtgtgtaattcatttaccctgacccctcgcaataaagcgatatgtaggctaccactactttttgtaaatatatgataatttatccactgagattgttctaaacttcctgaacgataaactttaagccttacctagtaaggcctatgattgtctccactttaaactatgaaaaggctagggtactccactaccccgggttatatatctctctatagagacgcgattgtagtaattgatatactagtgctaggaattgaacctaaaccctatagaataataagtgactaatttgttatcctataggttacctttagggtacttactactatactaccgctaccggcaccgctactaggaatatatatatatatatatatttcatttaccctaaccccttataataaaagtgatatatagactaccttaactatatatatccctatatatatatatagagtgatctacttcctagaaaggaacttagagccttattaaggcctcttatagcctagttaccgttcctattattaggctacccttatagtatacaactatgaaactgttataacgccttaataaagtctagtatagcctaggcctttttagcttataagatagtatctagtttaccttttttaccttattttaagcctcctagtagacttaatatactattaaacgcgttccctacttctctccttagatttctttataactctactagacttaggtagtctataagtatataggtaactatttcttatatactacaattatagcggttatccttactatagctaatcttcttatagtaggtagatagctaattgtagactatatacagctgcgttagtagatatacctagtccctaggtaggcttctatacagcttcctagtatatattaccagtagagtattattaatcttctgtagataactacctttattagatattctctatttatattcctactaggaggtaatatttctatagataaataccctcttccttataagtagtaggtagaaagggtaagatttacctaggctagctgtaagcttcgctatttagtctatagcgttattactgggattattataatatcctagtacctactaaaggtatagtacggttcctacagtctagaccttagtagcagcttagtagatcgtatggacgatcctttatcctaacttattccttatactcttaattacttataaggctaacttactatcgcagaggattattacagtcgcttatcggtcttctagtcttggttaccagtaggccatcttaaacatagtactgattatatagaagatacctattagctccgctatatataccgaccagcggtctatcggtctaacctagacctattaggatttgaccatctccatatcgtcattgaatgttaccaccgcagctcctgattgactatcgcgtcctgaggcgtccgaatagacgatgatatctgatattgagcggattgcctcggcctgttctatcgctgtctctcggtctgaaccgacttcgatctccacgaagggatcgagccatggcgaggctgtcttctcttgcggggaactatcgaaggctgaaactcctctaacgaaaaggggttggtcgtttcttgagtgtttgtgggtgtggcttcgagagcccccgcgggtgggtccgccatcggtttggggctagctcccgctcggtacacaatcacaacaattttatatagaagatgatatcaacaacgccttatctcgaagagtcaaacggtcttttgtcagcaatggtcgaaccggaccgctggcttctccgctaccaggatggatcgaaatcagtttcaccactttactctcgtgaatctttctcgtaccctatcccaaaacatgccaatcttgttcaggcctagcctatttccaaatgccgaatcgtattgaaaccgtctctcacgtgataagaggctctataaattacctgtaatatttttgcaaaccctactgactttattctttcgcatcaccttgcctggcagaaggcaatatcagaacaatcagaatttctgattcctgatcattctttttcggaccatatccagatgcagaatctggtccgaaactccctcggcgtaaagaggcatctcgtattgacgttgtgtcgaccggatctaccaaatatgtagctttttggcctggtttgccatcaaacgggttatcacgtgccatgtggtgattggcttaaaaggtgggactatgagtcacaaaagctcaaacacagtcaagagccccgccacctttctccgcacagacttcattcagtaaacaaacaatcacttgttcctgttgctcccaacactcatgtggaaaatcctaacaatcctggatcatgcttctgaaccgattttattgcacgcgctgcgcaatcagctttaaaactttcttcgcgaggctgcaacatatctacgactctccatatcatcatatctgctacatttgtttcccaccacaagatttcgcgaagatggttgagcttgatgagcacctcggaactgaacacaactactgtatttcctgcgacatccaatttgaaacagcccaaaatctagctcagcacgacataggagagcacaacatgtgtgtcacctgtcgacaattcttcggttctcgatcaagtttatccaatgttagtttgtatctaatttcccactacgcagcaggtaagattcttaaacattttatagcacatgaccacccacatttgaaagccatcttttagtatggaggatacatcaaacgtccaatgactattacacctcaggtggcaatatgtgcggagttgagtgtgcttgtatgttggttggccacgaatgcgagcgatgacgtaatggagactaaaaaaatgaacggtgaacctggtttcttcatccatcaatgtgggccgagaacagtagcttttacaattcttgctgaaccctcgtgataaacggtggctggatatgatacagcggggggcgaaactttatgatgttgaacgttattgtagttaaggaatcaagtaacaagtagctggacaggatcagtgcaagatggctcaagtcgtgatatggcgccgcgagtagaatacttccaatcatctcgatttgaatgatagcttattgtatccaaaacacattcatgcatttcggcaagtactgcgtaacactgaatgtatcagaggtgcaaggagccgagctcagaaaatatgccgggacaattgacactcccaaaatgataaagagctttgccaaaacgttttgcatgagtcaaagcgtgggtcgagagcaataattcctcataaggacactgttcacctcagactggatttcacttgttgatgaccccgcccgcacagtattgatgatgttacggacgtcatcatcactagagtcctggattgccctcaaaaagtcgttcaaaaacctttggtagtgacggagttctgcttctattttacttgcgtgactcttgcgtcgcttgtcggagctcatatcgaaaacgcaaatagagccacgcttcgtgcattccaagcatggattctcagaactgcactgtcgttgaaaaccaacaagtaagcatctaagtatacaatataatccaggatcctttaccttggtccgccggcgctgacattctttgcaggctgctgagagtcttcgtattaggtggtcttgtaccgggggtttcccccgttgatcagatatcaagggtttggtagctggcgtataaggctggataggcttgaatcgtgaacaagacatctgtatcgtgcgcttggtatcaatgtagacgcggcgggggttaaaggtctgcgtaagagaggtggccaagcgtacatcacaagcagtaagaatggtggaggcccggggaaaaagaggagccaggcagacccattgctgactcagcattctagactcgcccgaataccttacggtctgatacaacagctattttaggctgttatttacagctgtacagaaataacgccaaggaaggggttcaaggacagcgtaactgcaataggtatagcgtgtttcaccagagagtttgagaaataatctcagtgagcaaatggtgaaactgatttcgattcaccctgtacaatgaattccataatcatttttacaccttggcacattcctccaacagctccctagcctaactcattcggattactgatggccaatccgatcgacccaacgtgagcatgatcctaggagcgacaaatgtagctccctaactcaatatatcgtagtttgattaaagaaacagctagctggatttagaccaaaataagaaatgtaaacgcaattaagtacagtagcgatagaaaattaagaggctgctcattatcgatagcgttataggccgattcaaagtgttcgagctctcgttataggagagtgagaaaacggataactttcaagaaatattactatagaaatcgggtgtattagatatatgatgaccgttatacacaacgacctcgaaaaaacgtttttacttatttaaggaaactattttatttaatcgattactacctcagtataaaagggaggtactgtttattagatttaattggcttatatatctctacttattttaatatctgtgtattccctaataccctaataccccctatatctactagcgagaatttcttaccctattcttataagattattctcagccgtttactaatacctaatattactatatacctatctttactatattactatggcaaatttttagtcatctactcgttagagaataggctagccaagatatcctatagactcttaagtctagttatatagtcgctcgtataaagcctaaagtagtgtaagtaaaatgtggtatctatatagactataggggtatatatatatattacgtgctttttactagattaccttatataatatatattatagtgtacgccccctagattatatagtatataagatagatagaaatataatctatatagaaccatataattaggttccctttaaacgtaaggaagctatattcctttacttccttgtataacgccttttatctaaagtcgactatagtatctcttaatattgattatttatctacaaaacttcccttaggaacagagtagtagtcctaaggatattctagtaatcctagggtagactgatattctaaaagatagagttagtgctcctaaaggcagagtcagtattcctagggatatactagtaatcctagggatatcctagtgatcctagggatagagttagtattcctagagatagactaatattcctagagatagagtcagtactcctagaggcagagtcggtattcctagggatagactaatactcctaggaatagaccagtcctcctaactaagttaagattatacacaaaatatatatactagaaaaaaggaaatacttgtagagttataatattaataagtaataaaatagaaggtagggtttatatatctttaataatagtaaaataagaattaataaaatactaaagaatagctaaaggtagtaagaatatactagtaaaattttaaggatagataaattagcttagaaatccgagtataaaagttttattaaatctttcctaaatttaaggggtactagttataaaatcatttaatataataaggatttatttttctaataaaaagataatagttattttatttatacctatagttaactaattcttctaatatttatatatatatatatcgtttagctctaaaataaaattctagtataactagaccttagcttaatatattattataatattattaactagctccttaaactttagagaagctaactagtttttagtatagtaggtattaatatagctatattaataaatttactagagatagttttaggttagtataggctataactctaaaaactatagtttctagagagtgatactagtttttaacgctttaaaactatagctatttaaaggttttcagaatccctaagaattacttaatctatatatttagttccctaatctctttagctattcttaatagtagtactttaaggaatctcttagtatagcttctatacctcctacctattctaatcgatcttactctattaaaaagttaatatactaaaaacgaggttattataaattaagcttaataaaaaaagtgtctaaatatagtaagatatataatatagatatctatataggtatataccttcgggaaaccggctaagtatttatcctattagcggatactttaggattttaggtattccttagcttataattagtatatctctaactatacctttaataaaaagataactaaccttttaagaattcctactatctatccctaatactagtaatagactagggtctagaggagcttaataaagatatactaaaataatatatataaagttatataactaaaggggaacttatactagactagaatatttgcaattaatatcttatatataatattttctatctataaattagaatagctattatattaatagattaggaattagtaaggccctaagggtaaagtataataacttatagttctaaagtagaatctctatactaaataaagagttcgcggtatattcttatataggttatttataactacttataggcctaaggataggggaaagtagatagcctatatagttagcctatagtatatataattcgagcgtagtatagataaagtgacttctagaggtatagtatagaaaaggctatatataaataaatgagaagttttcgtaaaggttagagaactattaactagttataaatcgataaggtatatacagcctagaaaatatggtagaaataggcttagtatagggcttatataagatatttctaacctaggtaaaattaattttttactctagacttaggggttacctaggtattaggaaaaatacactgatttagagtagagactactatctacctaataatatttaataaatactttagttatttaaaaggaaaagaattatttcatttttcctaagacaaccgattatttaattaacagccataagtttacttactattagcccttagttcttaccactataggccttattcttattcaattaagcagcttatccgaatatataatattcttatatattataatattatttatataactatataggtttctttaaactatatctatcagccttagaatttacgtatagttatctacttaggatctaagtctaggttaagtattatatactttaaataggatataaataaattggtttttttttctctctaagaactttctttctatcttatatttctaagtaacttataatttaataattagttataagtttacctactagttaagagggtatataaagtggtagttaaagtatagtagtaaactaagggccccttccctacctaaagtataagtctatatattttataatctatttatatccctagcttactaactaaaaattattttaacctacttactagtacctctgctctattctaagattttaggtaagaatagagaacttaaacttatttttcctaagttatactaatactataatctttactctatattctaactatcttaacttatagtagaattagacttactctaataaggtaactatattctaggctatatatagctatatataggtataagaaatatatatataattacttatatatattaagcctatagggttaagaatatattatattctagccctacttttatatatataaactagtattacttctattatacttataataatagggcttataaacctccctttatatatttagaaagtacctatttatatatagtacttaattacaatctctagatataatctaaatatctataaaatagctatatagtatctctttatagctcttttagaaacttataaatatagaagaccctcttattagactaaaaattcgttttatatattagtaaacctataaatacttatagcctaataaagtctttttattatatcttcttctagtatttaaagctatttaagtataagctagtatattatacctttaacctttaatagcgatagcctttagagctttcttaagtaaattaatatactagctttaagccctaagtcctaagctatattagttataattaaagaatttagctattagtataaataggtttttactagaaataaggagttaaggaaagcctaaaataagatctttaatctaaaggaaagaaagtaagttactattaaggagatatttatagctaataagagggaaaaggtaaagtaaaaagaagctcttagttaagttaatttactttatatattagttaaatagaaggactaatcttttactaaatactctaagtaagtataagagctctagtagtagatagataatcttaagttatcctacttattagagcttagtaaagtttcttaattagctaaagatattagtatactttaatagaatttaaaagagaaagataagattattaataaaataaaaactattagattaagtcttaaaataatgcttttattaatatagtagaaaatagaagagttaaaagctaagaaagctatactaaataaagaattataaataagctaaggctaactctaaaatatcgaaagctttactattctataattagagcttaataaaagctcgatataagttatatataggtatttagcgatatttatatactaatatattttacctagtttaataaactttttagatctttagatttttactctaaataagataactactatcttaaaggaggatcttatagaaaagatcttaaaggtatatatatatctagccctttctataacttatctacttatttatttatcctaaaagatatatttatctaagaaaggctttaaaaagagaatactaggttttcttagtaatatatccctataatacccttaaacttccctaaagctaaagggatatacctagctataaccttagctattcttttaaaggaaatttataaaaatatcttttagcctaattatattttacctaaagattctaaaatctatagaatccttagttaccttactaagaataatactaagaaggaaagtttttaccgatatattcttctcttacttagtcttaatactaaagagagtcttctctaaataagggtttagataatagtctataatatattattatatctatagaaaatactcttagaaacttagtataatttaatctatataaatatagagaggattatataaaaagtagctaacttttagcttttaatctaatatacttagtagagatataagatagagtttaatctaatggctaacttttagcttctagtctaatatacttagtagagatataagatagagtttaatctaattaatcttaaagataataattagaagccttttcccttcttaagagataatatagtcctaaattactaaaactaggttacttaagatataaatattctaactatatttctatatatcttactagtaaaagatagtaattataacctattaacttagataacctagttataaagtttatagaagctttatatagtagtagagtataaagctagttaaatattaactagcttagttattccttaaaggttattaacctactctagatagaagtctattacttataataataagtaactaaataatacctcttttttagataaaagatagctatagcctttataatttaattaggaaagtaatccttatacttatctatagagttttatcctactattattagtaattataaagtaagtaataaatagagattagggattttttacttatatatcttacttatacttattttattctaattatataatatttatttaatagctattactatattaactattaagtttattatagtagtagtagtagtatttatttatattaacccttataaagtaatatataagtttattataggtccctaaaaatatctttattattctagtaacctaatttagactaatagtactctaaataatagtataagagaagccgattatattatattaactagactttagcttaactaatttcctaaattaccttttatagtaccacttatttttaagtctataaataattattttagttacttactagtttatttaaggatatagagtaatagaggtttctaaaatctttctttaagtaattttatagcgaaaagctataatagtctaactttattattaactataaataagagggactaatataggatataataagctaaaagtagttagtatttctatatactctacttagagtttcttatttaaatataaataatctataaatatattattattagaatagtaaagacctatatctaatatagcttactttaatagactttattataaactaagtttattctaagtaatactaactataaaaaggctggtatagtataggaattaagctatattattagagatagtttttttataatatctataaagaacctaattaattatatatttaaactatacttatagtatatagtctcttatactttattagaagtataaggtatatattttagttaccctaatcccttataataaaagttaacttctaaagtagactaaaatataaatctatacttagcctagttagctatagtttagaatagtcttataagtataaaaaaaaaagtaaatatttaatctactaagttatagctaccctatcgaagtataactatagtatatactttattaatatattataatagctattattctttatatctaatctaacttagtagggccctagttaaattattttataacccttagtttatatatccctaatctctttctccttctcttttcctacttattttatagtatattctctaaaagtaaggataataattattatagttatctatagtagtagttttaaagtacttatatctaataactagtctatttaagagatagctcttaatagatataaagatttacttacctaataggtagaacctatttagactactagataggctatataatatcgattaggataatatatatctatccctcttataaaatatacccctccttatccctactatctattaatttattagtataacttagccttaggatatataaaagtcttatatttaagctaatataaagtatccttagtagtctaaattttagataccttttatactaactagtataactataatagctattaaatatatatacctttactctataataatagataatactagtaaatagtattttagaatatactaaactagatactagatataaataaaaaataagaattaggaactttagctttttatataactatactttatataagttagcaattagtataggaaatattatactttttaaggaatagtataaataatttctttaaatagttaaattacctaaagagtaataactaagaccttctatataagataccctttattctatctattaataagctcctactaaagataaatattaaagttacctctaggagttaatacctttataaggtttagtaccctagttactatagagtaatctaactaaagattttctttagggctaggtatactatagataatactatattctaaagaataccgaatcactctaataaataacctaagggtatctccttcttagactaaaataagggggtaaactataagaaagatattacctttagattaaagagtaataaaaatagacttattctatattatttctacctttagctataagttaaagaacctactaagtataatagctaatagcttatataatccacttaattagaatatagtttcctctatattagaagactataggttaatagtactattctatatatttttaggaatactaagtctatctactataagtagttagcttagctatagtctttctataaaattacccttactttccttagctatatattcttctaactatttaatatagaaggtatatctttcttcctagttctagactatctctactaaaaaagccctagattctaataagtagcttttatagaagcggttaaattcctttatataatataagagaattttattaatacctatattctatatcttaaacagttatttctaaaaaagatagtactactattaattagtaagactaagtctataatctacttcctatataaagtacttagtagcgattttcttagctattataaatttattaaaagagcctttagatattagtaaatcctttagattaaggagcttagtaccttttttaataatttcctaatatatagtcttattaaattaagactagatactattacttactaagaatatattctcctacttaattagctagattatattagggtattataacttaataatattatctataaaactctaaattaccttaacctttattattataattacctactttaaatagtatctatatcttttaagtagattattaagtttaatatagttaataaatatattcttaataatactttataatacttttctaccttaatagttatataagttagttaaaggtactatagttaggagtaagtttatcgctatattcgctttattagttaatagggaattagttagtatatctcctaaagatagtatagtattatttatcccttatactattactttaagagtagtcttatcttttaccttaactttattcttccttttctttttataagatagtatatctagccctatatattctactttacttcgttttttaggtataggaaggaactgataagagctatactttactttagaagctagactagctataagaataggaggaagaggtagtagatctattattcctacttactatcttatttagtagactatatatattaatagaaagttactctaatagtagtctaggggcttactaaagttagaaatactaagtatatattacctaataggcttattactatagttactaattttatatattactagtagttcctagattttctctactattaaagaccgaaagatttcctctatagttaattatatagtaggtataaactctaactaagagatattagggaaaggaaagatattaggctactactattttcggttatataggaactactaatctatattaggtaatataggtctagactatagctaatagaataaaatagaaagaaagggaataaatagtatatatcttataatataatatattatctcactactagtaatttatctatatactcttcctattatagtattactttagtaatagtatattatataggtttcttcggtatatcggtctcttttactttcttatactctttaggctaccgcttcctcttaactttctactttactagttctaatttaataaaaaccgcctctctctaaacttaagatagtaatatagctcgctttaaaaaagataactctctaatatatctataaaatacctcgactttctatatctctaggtatacttttatctactaaaggactagaagctaataacctaagctatattatatattatattattctaattaaatatagatctttataaaaatcttcttatcttattaaattacctaaatctcctatttatattatatcctaaagctacagctttctgagcctaagatactacccttagtataaaattaagggataatctatctaagtcgcttatatattaaattaaagatatacttataacagaggatatttaaatatactttatataagtagaaagttaaggtatctaatatatattatatatataaactagtgtaaacgagcctccttaatagaggtatataagaatacctacctcttagagctttaagcactaatcctatactatcgtagcctctaataataagactatagtccttaataagtggtatataagttagtattataggaataaaggcaggaactctgcagtattactaaatttaattcaggaaggaactactctgatttatattaagataagtactaaccgctttaggatactaattatacttaaaatatatggcctcaagaatttctagagctaggacctactagtagaaagctgattggactagttctttagctaagctctaatacacttttattaaggtataactcttctattcgaacaaatcgatagataactgcagctctcttaaattataaagatatttacctaagagcaaaagaaggacggaagcaggtagaagaacgtgagaagcaatcataagggagacaaaaagcagaagagtatactaatatacctcttttacagagcttttacagtaccactatagcgttcgctcctaccagttataagttctattactagataaattatatagctagatttattagttttacacctccctatcaattaactgtaatagtatagaagatagtgatttctattatctatcagtacttcagtataaaatatttttcaactattataagaataccgcggtactttatactcctataaacttcactagtagataactaagctttatacagtataccacgtttatttctcaggctcctatatcgctacttagaaccgtgattaccttactctagattaaggtatatatctcttatagtctaatttattgcagggtagcttatctttcttctatatagggcgaatttaattataagtaactatatacttcctaatttagcggctctttatagtcaagcttcaagcttcttcctactttacttataaagcttctaatgaaactgtggactagtctgatacttagctctatacagcctctaatatactttttagtatagtaagtaggagagtgaaaggaaaagtaacagctattctttatataaagtctataggcacaaatatactataagaaggactctaatagacctataagctctagtataagccttaggcgatatagatatctacttatatctactgataatatagttatattatatagtaagttattaagttaggttattaaagataagttattaagaaaggaggggtctagggctatataactagattatattaatattaagtctatatattttgttttacttatattataaaaacagttaactagctaaagtggtcttaatctagcgcctatacagcttttagtctcttataactactaagaatcaagaatttcagttataatagaccgctgcacgtttttaatatctagtatcgaatataagacttatcgacttactatctattactatagagttagtataatagctagataggacaggaaattagtaactaatattatatatttccttaataaagaaataccctcttctaataatacagtctataatatagtctcgaaaagatttatcttaatcagtcgctatcttctatagaatcctacctattcttataataaggtaagttatagcggcagcccagatattaattagcctaggattaaattccttatatagatattgttctagcgatataaaagggtgtgaaccgcgatatatcctagatatatatatctagtttttctacctaaggcagaaacatttagcgctcctaaaatcggaaatttttaggcagctattagagctaagaagaagattctctagctttaaatcgcgataagtaattcctatcttataaatatagttaatactatatataagctgtttaaagaaacaatcggcctctaactcttctaaataactagatatagctactaaagaatacagatccctactagagtaatactctaagtatttataaaagctattatttcctatttaaagtaactcgaaagtctaaacaatattttaatattataataaaaaggatatataaaactcggatttaacatgcctctagtaagctatttcagttatttatactttacagcggaagattttaagtatataaaagcgataaatattcgggttctactcttagattttatgtaatagaaaaacggccctaaataagctatgacctagaatatcgtatatatccctatatttctaggctataagtgctatattttccccagccataacgctagttttttgattctctatctactatttctattctgaatccacggacagttataagtaaggttttataattatccccttctagtatttctagtttatctttcgattctctttacagaagagtcttttcgacaatagtggtcttagaaagtagcagtgatccctattctcaagtataaaccttttattcctaaagatatattttctaaacgtaatggttaggactagaattatactatcggttatctctatacccactttagagtagatagaagtttaagatatataagaataattgtatctacaatcgctaggacctctatattatcttcctagagtataagaactaaagtatttaaaagttaactgaagtagcttttaaagataaataggtatattcctatatcctaattagctaactaggcttactcttagtaagttaacgaaattctaacttaatatactttagtatatcaagttatttagtttactaggagagaatttatagataggatagattagatatatcacatatactttcgtaagataaggtagacttcctatatcgcactaataattagactagggaattagccactactctaaattcactaatacctagttcttagtcttagcaattctctgtttataggaactaggtatccttagtatatagagactgattcttagcgcttagaagttctcagcagtattgctattattaggtagactccaactagacttaccgcgattaggatatttcttcgattataattaaatatcggattataattaactactatctaatagctactaatcataaggcgacgtacccaccttatagatacagcctaacgtctcagcactaagcctataactagtaatagctcctataaacagtataatataggttactacctagtaatctaccgataaactaaagcttaatatagggcacttataccgactccttattataactaatcgcagatatcgtataagacctaataaatataaagcctataatccctatatagagcttatatctagtttaatactttagctagtagatactttaggtaagacagagaaataagcggcttagtaaccattatacctagctatagctagctacttaactaaaataatctctaatactagataagaaaaatgatatcgcgcctaactctaggtcaggcagtagtctactaagctagccagcttatatactggcttataaggatataattaaagaactcactactaagctagacaatagtctaccccttaacaaagtaagtcatcgtttctagcaatatggtcctaattaactagataaaggggaaggtatattgttagtcaagatttttgtacagtaggtagctaacgcaataatactagtaagagactgctatcctctttaattaagccgaggaaactagttaaaaattgtctaattctaatctagtcgtttattataggtactgattctagccatagcggttagttttagaattcagtcatagattaagggcagagtgatctatatagttattatcttaaatattgttattagattctttcagaagtataccgctaaaaagactatagagtcattacattcgctattattaccgacagggactatcttaagaggtagacagatattctcagtactattatctaagattataccgggtaatataattaagctaaggataggggatactattctagtggatatttagtaagatgattctaaagttattaaaggaattggtaggccttttactaataatataaaagcctagttgaaatagttaacttcgagactaataaagctcttctaataggcgagtctttacctatctagaaggaatacaactcaacttttaaagaggatactaggcctagagaccaccttaacattacctacagttctaataccgttatttatggtcgtaggtatagtatggttatcagtataggtatatttaccgaaattagttctattaccctcacattataggctagcggtagtaagcatcgtcctattaagcatagtcctaacggtaagactaagaagcggtagtatatttaggcctagactcttatatagatagatactataggtcgattccttagtattaatatcagaactctcttataaaggaagcttttaaaactagcctatttactatttagaattactattatatttaccattatttatatagctataaacttattcagtagtagtaaggaagttattatatatactattacaaccggtattagtatgattccagtatatctaatagttatacttactattataatagtagtaggtactaaatatatagttaagcggaacgtgattatttataaattagacttattagaggcactcggtactattatagatatttattccaataagataggtactttgacttaaggcaaaatggttatcaaaaaggcatagatcctatcttaggggatatactctgtcggctcgtctaataagccttttaatctaactgttagagatattacctacactcctattctacctttgtaactcattaataaaaaggaaggcccccctatagaaagtatagaaggtctagtctcaggaaaccgctagctagaagacttcttagatatcgcgtctatagtaaacctctcttacatttataagtctaaagagggagaatagtatatataaggtaaacctacagaaattactatttatatttttatattaaggtttaactagaaccgcgaccgctagactaagggttaaggtacagtatagtaccaaaaggctaaattcctatttaactcaactatcaaaaaaatgtccgttattttcaacaaagctaccctatataaggactatataatagtatttactaagggtacagtcgagtgtatcgtagccttatataccttaattatctaggactaggatttgttaacccctgtcctaataactaacaactaccgcgaaaggatactctagaatatagaggaactcgctaaacagggacttcgggtattagctttagcctatcgattgtatactaaccaggtataactacttaaaggttctaatctaaatcacaaagatatagagaatgatttatacttccttagactaattggcttatataattccctataccctgagatagtgggcttaatctaggcctactaccgggtaggtatagttatctatatagttactagtgattaccctagtactaccaaagcgattgcctagtaagtaggaattcttctagctagttttaatactatagcggctgatatcgcagatactatagttataactaccagtcaattcgataaccttactaataagtaggtagatacgcttccgaccctacctctagttattatacagtatactctatagactaaggtatatataatcgatgccctttatcgctatagttactttatagctataactagaaacagagtgaatgattctccttcgcttaagtatactgatattagtatcactatagggcaggtaggtttagatatagctaaagatatatctaatattatacttatagataataactttgccttaattcttaatactattaaagaaggtcgtcgtatctttaataatattcaaaaattcatactttatctattattagaaaatatcgtataggcctataccttacttatcggattagctttcaaagacactgataatcaatctatcttccctctatcgctagtcgaaattctctagattattataattatatcgggtatacctaatataggccttagaatagaggtagctatacctaatattataaaccgtcctccttagagtaagtagggtatatttacctaggaggtaattattaatattctagtttatagtatctagactatagccctctgcctagcagtattctctatctatatatagggattcggcgacagtaacctggcctatagctataataaggaatagttagaagagattaaagactataaactagtcttctaagtatatactataacgtttatatacttaacttagtttatactattcctagcttaggaaatagttaacttataccgctcgtttttctatatatagctaaaatctaagaaatactttacctaatagatatacaatatctagtagaataagttcctcttctagtctattatagccggatagatcactatattccctattctctatatccctattttaaacgatattgtcttcaaatataaacctattacctaggaatagggtatcgtagtagttaaggctatcctattctttattggagtcgaagcctagaaataggctaagcgagtcttctttcattatagagtgagaaagagcccgcacttaacccccttagaataaatccctaagcagccctaatatatactttccttagcctaatatcaaccggagctagggaataaacactatcttagtacacacgtattataggaaaccacttactagaaaacagaatattattttatagaaattacaggtatatagaggagaagggaaattctagaggaggtattataacagattataggtaggttaggcttaaggagtatattgcccctaggggttattttcttatacactaaatatatacttggttcgattaaactttatttctagaactttactaagaatacaaataagtaagaggagagaacttatagtaggtaaattatagaaataattaatataagggggtaggtagccggtagccttagaagagagggaatttgaagcagcgatatatagggctggtatactatataatcagagttattagttagtgccttacttcctctcacttattaaagccccacaactgctcagaaacacattgaggtcatcactgactctgagctcgtactaatatctaccagtgagcctaagtctaagcgcccttattaaagcgacggtatcccaagtaggaaatccctatccgccagggaaaatttggtatatatatactggaaagctcctgtcggtgagtcctggtcagggcggatcatgcttagtgagcaagagcatgatcgtggtttctcttttccctaaagcccgggagtgcctgggtataggatgtcgcacgtgacctggatgacagattaatcaattggttctcaacggcccgtcagcagttgaggtccccacatgtgattggtgactagcatgtccgtaacaatgcgatttggccttcaaccctctcgggccataagattagttccctggaaccattattgtcatgttagaacacatttgatgttatataccaatactctcaaataaacctatatcaatctttaagtctcttcgactgacacagcgaaggctagacacgggccggtcgtccctttgctcgtttttttacttccgctcttccgtgtggatgagatgtacatccgagcgcgtcgtatcctcgtcccaaatgaagccaacttcaatctctttatctgtcccagattcttatatattagtcgaaagattcctattataacattgttataatagcacaacattgtcatacagaaatttgcgagcaagacttatgagacttccttcagtcaaacttggtttgagccttatccctatctgggtgatcttcttctaggcgttcgcctgggagaacaatggcacggtcgagcttgtagggcagtccgcggtgacggcctcggatcatcatcacacaaatgacaagcttgctgaaaacggtaaactttccagatagagacgtagaaacagttggatacccaagactaagtccaacgttgccacttaatcgaaatcagtcaaggcaaaaggagtaaataccgcatggataactcactatgccgagacaacttcgaataacacagaaaatacagaaaaggcctgaattggttgaattttagtatcgcgaaatttgagaccaatcacttactggaattgacgtatctgcgatcttgccggcctcggcgacgcagatgcaaaagctgccgaggaaaatgtaccacaagtcaaaggtcagttggttctgaatatgattgacaatgtaagaccggccgttatgctcgtcgatgttaccgtcagtggtatatacacccagcgttctttcttcataaacattggaagctctgatgctaatggcaatcggaaaaatcgcaatatacatcatgaccaccaagctgaattggacggctgggctcacatcagccaagttgaaagttgatgtacccgtatgacgcgacgatgcggcttggaaaatagcagcgaggactcgaggaccgggtgcgagattattcacggcgggatttttcaagtccagcacaatgatgagaataacatcgattgagttcataaggaataagattccgaagagaatccacgtcggcccgcttgggaaaagcagcgtatagcaccgtcgcggatgatcgagcagaaatcttagtggatctttaagagaggatttagccgggcaaaatttgtagaaaatccagataataagtcgaagaaggcacggataacaagtgttcccggcaaatgcaaggaaactcataaggatcattgggaaagtcgcatcttgaaacgaaatcatcgaatctggtgttagagtaaagccaagattgtcaatcatcgtctgagaggagtaaaagcccctatcgcgcggtaaacgagatcagcttctataccgttgattatagttcatggagccgacttaccaccaaacattgccttgcccacattcagcaaggtaatcacggtatttcggatccgcgtgcagaatccaccccacaaggcagattgcaccgaataaatgcagaccaaagaaatatccaacaacaatttttaacaggagcttcaagcttcgatactcgataccgccgagtgtttcccgatctttggcagacagattatggaaccgagagttccggcctattgtagcttgtgaagacatatgcggcaaattgagctgctttatgtccctccgctttgtggttggcatccctcggtcagagctagaaaagcctcccaaaataaacacggaggttacaactcgctcaagggtgtgagtacgagactgcatgcttctagtagtcggtcgacgactaaggactttctcggttcgtccttgtaagaaccaggttagcgaagcgattaacttggagttacgtttaggcgcgaccttatcaggactaaccatcatcttcatcatgaagcctttcatcaatctcagaaaacgaggcacctgtatagtattgtgagaaacggaggaagatatgaacctgatttgtgtatacctctttcacgtttccacggaggcggaatatacagagctttatccttgtcggaagacggccgattgtcttcagcgaatgtaatggtttgctttgtcggattgatgttcgaaaccgctgtgtcatcggcttttgcatcgttcaattccagggaaactctggtgtatgagttagtacccattacgtttgagagtctgtagctgatcgatggcatcgaaaccaacctcgaaaatttgtcccaagtctcaacacacgccttttctttttccgagtcgtctatttcgtggctgctaaattgatcgttttgggcttcatcatcatggttattcaaactttttttgtgcttcaactgtgcctctgcgtcttgttcggggggagcctctggtctcaaaaggttcggagctatattttggagaagcaagttagttctcgatgatggcgttgggtagggggttaggtggtggaagacttctaaccgattgctttgaagcgcttttcaaaccatcgaacccgaaatacaattacgatgatgttgatgaaccccaagtttcctaggatcggaatgaggtataggtacacttgttggtaggtctttaaagatttgacgtcgacacttgacacccatggaaagtctttgtttagccgacttataaggatggaaaaaataacaataaaaactcacgtatttagacctgactcagtcgacgcgctggctccgaaaaaataagcatcgacagctttcagattaccatgaggatatatgataaccaagctcagaacgctgagggtgataatccacgcatctgcgaagaaggattagaaggggatattgtgtaactgccgatggacatacaatgcagggcgagaaagtttatcgatggcttccacatggcacaaaactcgcaggattgctttaggaagggttctaaagggcctgccaaattacattatatagcgcaggcttatcgcaatttgaataattaccgatacaacataaaccagagcgatagaaggatttgagtgtgagggatttgctaggcaaatcaagtttggccctgggtcgctgcttgcggcttgactaactcgcttccgtggctagcgcgctcttcgaataagcgaggctgagcatcatatagaaagctttaccccgtacagttaaatcagctgcctggggcttatttttaatattctagtaatatcattggccgaagtgtctctctcgtagcacgcattgcctggtagataacttctctttctcggccttgcgaagccttccattccagcgggacaaagagatatcaagcgactcgctagtgacagtcgacgtagcagagggccaacgagccagacgtaatggctcgcttttctaagacgatgttgacgaagattggtcaaccattaagaaggtaggcgggtagggtgctaagacattagcgtgggagtggtacgaagaataccaagttctcctgaaattggtagattaagctccgctccattaattttgcaatcgaacctgtgtttgtcaaaaatatatcatgtcctctgagccaaccgtcttgatgggctatctacggcatgaacttcttttgggtcactaatccacaaaagcagccccgcacgtgagcgctaacattctaagggaatccacttatgtaaacatgtcttacatcttgtacagtagtagaaatatgatgatcatgatggatctgtatggcgcaaaaaaatcccgctttttgcatcaaatgactgtttcccgccaggcaaatcaagggaatacttatatatgcaagttcaacctctctgatattacaataccgaccagcttttgttttatataaaatgaaaggaaaatatgtcagcgactccaaatggcccaacagcctccactgctgtcaccgcagtcatatgcgctgccttgatcattggtctatggtgagtatttaccagacattatcaacgaaccttaaagagtcaaaataacctgtctatttatctagtttcgctgcctttactcgttggttctgttacatccgaagacgttccacagaaggaaatcctgcggcagttcctcctagcgttttccagctgcaggcaaaccagtccaaagtgcaggagaaacctctgaccgtagaggacctcaacaaatacctacccatgatcgaatacaaaatgtggaagagccaacaatacgaacaaaggtgccatgtaaacattttatttgcctgcggtacaggcttgtgctaatgagtgacatagaatgagcttccctcaaactgcgactgaagctcagaagaccttgtcggaccccaatgtatcagcactacttccccaatctcccaccgaagacccagtgcatttgtccaacttgaatgcaagtgtcggggctcaaggtcaagtaaacctttctgaggaagttcggagtaaggacagacttttcgaattctctcttaccccgaaagcccctgaaagtagttgtcagactatacagagtgccgtatctccagtttggccggtagaaaaaacggtttccggtgatgcatgcgctatatgcctagataccatggaagatgagatcaaagttcgcggcctcccctgtgaccatgctttccatgttgactgtgtggataagtggttactctggcgtcgagcgtgctgtccagtatgcagatatgcttgtaagatacctccgaaagtgatgtaaaaagaaattggatagtatattgcttctttggtcacaatgacctgcctgaatgcttcatttccgaaggtgtgtccaccccgcaagaggtatagtacgtagtcatcgccacgagagcgatgtctgacaacaaagattggtttcgcatcaaaaaaaagaagaagaagaagaagaagaagaagaagaagaagaagaagaaaagaaaacggacgacttgctccaaagccaacaaatcatcgatacgtttcttcacctaattgttttttgtggctcggcacaaaagaggtggggcctagtagcctgccatcatattgggtgagaatacttcggtgtgattgtcgagcgtacttcctagctttagattacagggatggctcagactcatctgacagcggcgactatttttttgccgcgtgaggtgaggcttggtcacgccgttcggtttcccttagtgcggacgatataacaggatgggtgaccaaagcgtgcttatctattggcgagcactggtcttcatggggaagctggcgggtaccgccgcaaacgatagctagcacacaaacccaggcgtgattgtgtggcaaatccctcacgcaaatacgccgctgtcccgggtagtattgcatgcggcaattattaaaatcacgataatgccgcaactatatattgagtttggcaggcctcttctcattcttccacctttgtacagttcggtgcgtcttgtactatgtggaaaccaccaataaagtatcacccgtgcatcgtatgtgcattggtaacttctaaccatcactgacagacccgtggattatcaccctcagcgtgctgagcttggttatcatatatccttatggtaacctgaaggcagttaatgcttatttcttcggcgccagcgcgtcggccgagtcgggtctgaatacgtgagtgttttattatccttttcgatctcaatggtcccgctaaacgacgatacactgttgatgcgttgattttcagcgttgacgtcaagttcttggagacctaccagcaaatatacatatacctcattctaatcctgggaaatttgggatttatcaacatgatatgctacattgaccaggcaagttttctgatttggcaaagggattctttctgcttccgccttttcgttctcgttgacagcaaaggtctcttcaatagcgattgttttcgtcttctttatatcaaggatctcgctttgggcttttcttcaactcctcatctctggtgaatttgttccgctgttgggaaacctcattaaacacggctggggcgattagagattaagagcttgcagccagtactctgattgtttgaaaaagctaagtggtcagaagagatcaaagactgcgaactagtcttccgagcacgtgccaccacgttcgtttgcttaacttggtttacactgtttctggcttgggagatggtcaacatgcgccgctcgttcttccgcatgcagccaaaatccaaaaaatactttacacaatggatgtacgatgtctggcggaacaagtttcttttctggtccatctggccggatggatcaccatgttccctatgatctatatccccgtcttgaacgacgtcgtcttcaaacataagcccatcacttgggaatagggtatcgtggcagtcgaggctgtcttgttcttcatcggcgtcgaagcctagaaatggaccaagcgagttttcttccgtcgcagagtccgaaaatcttccatattgagttcgtccagggacgtcccggagcatccctaacaaacatttccctggcccaacatcaattggggccggggaacaaaccgccacatggtgcgttagcgcacatatcatgacttactagagacttactggaaaaatcaaccatagcaattgtgaataccgggtatcgagagtggattgtggaaatttgtggatcaagggtttgagaacttccttaaatggtgtatcgacaaggtgcgagcaaagcaagacagtgctcacggacatttccggcacgctggtctcaatattgaagtatttcataccaaatgcgttattttgtatgcatttttccgccgtcggcacttgcttatgttaattcctgacttgagatgtgaccccatgctcaatagtcgcgtggcaaatccacatttcatttgacaaccagtgttcatccatagacaggcacttaatataagctgaagcatattgaatttgttatacgtttcagactacagtgtcccgcttccggattcgcgctgaccttattacatatgtataagacaggcgagggagacataacgctaccactagatcctaacttttattccgttaagtcgggtataagaccgatccaaaccttatgatttttaagtaaggacgggcatacgtcatataagagattctagtaaagagatgacttcattagagatagactttcaaattgtattaatatatatatctaacccccaggtaataaacatttatatatttctcgctattatatatcctacttaagccaatttcaccctatctctttttaaataataaatcgttatttatatattctattatccaaagaaaagggcctattaacagtatataagctattatttacacgcctaccatattattcaatatatcaagatcgctttaactgtggtctattaccctatacaaatttcagcctaagcttaagtctctaaaataacaaaataaaccagagccgaaaactaagttatatatagactattaaaatactatattactccctctaggcgaatgttctatttacctggaagagctaggttcaatagccgtctttcgccagctaccttatagctatattatctattaaccttacgcagatacctagctttatattagcgataccagctacccctatatcgctagaggttctattatctacgaaagccacagactctaattataaaggaagcgcggtctacaggttatagactaagttcgctacttataggttataattcagtatattggttctagatcgtaaaagcctagtttaggagaatattatctaggagcctagtagtagccttcggttcctataataggagttgatactttacttataaatactagatttttttaaattaaatctatatacaggaggttcttagattaccccttatttatttaagcagtcgttcttcttaatacctcttactatcttataagtcctctaccatctactaatataaggtataataatacctagtttctattataacatttctatactactataagttcaactaggacctttattatttatttcgacttacctacgatagatcatggcaatatcccaacttcgaatagctcgctacttagcagagtgatttcgtagattcccacaactttcctaagggtagccctattctacacgtactctcgtctatactataactaaagtaatatacttatataatataatatatttagtaaatatataagttagcccattacctatatctctgcctaataggtaaaacggcagctattctccctatatagataattcttctttagcttcccctagtaggaatccgaataattgactataatcttacttccagtagtcactccgcgagagactataagtatatattctattctacattagtaaaacttctaaaactagctattagggtaatataagtgattaataaagtaagtaaaattacctatttaaccttagaagacctaatatagtcgttctgggcttccgcctatcattacatctagaccttcaattccttaagtaataaggccaataaactctacaatagctatacctcggtcgaattccttctaaatattagtgattactatattaagggcagttagtaaagactagataggatatctacatataatatatatagcaggtaattaccctattattcttcctactagctatattatataactagataggagggggataacgaataccactaaacaaagccaagaaataagaacagtaattagagattatattatcggtctattattccttatacagtcgataaatattaggatcaatttcctacctatatcgagggttatctccaccaaatatactaggatcgatcatacagttattcataaacttataattaaagccgtttagtaatattagatagcggtaggtggttttaagcggtaatactagcctagtatctagcgtaacctatttataagggtaaccagagtatcggtaagacccattttagctaataactcagagaaggtcttactaaccagggtagagagtatctacagtaactttaaggttagaagcgatatagtataaccaagatataagtccgttatcaaagcctatcttatatttatatacacaataaataccggacctagtaaatattagactagcctaatccctagaatctttaatttctttatagctatactaaaccgccctagagaataatcaataataaattctaatatatagatataaggaaggggcgtttaaactatagaccgaaagaataacttatatcctatttctaaactcctttttatactatattaatataatataggcttcttttagagctactattcgagcttcagtattcgtatagcttaggaacttaagataaattaatataatctatactttatagcattctacctagtatacttacactactatttccagagcctataataaccggctctagttatagtatttcttatataaaccattaatagcccaaaaaacctataaatatcgctattaggatataataacgcctactaccctagtagaaagaattcgtacatactacttaactaatactagttctaagactgaattctagtctatagtcctatactctagttagtaatagtggatttaactagcgtagacttaatagaaaatatactagaaacgagatactcaaagtaacaggggaatatacttaccgctagatccctataataaatttatctatagaagaggactatagggtaggaacagctatatcctttataggcttcctacactaaggaaagtaggtatcgctatgaaattactaaactaacggttcgattctaatattagatagttatagacaagttccggtatctatatcgctatctaaccctaaatcctctatcgctactactatagcagatgattttaacggttgtagcctactaacagtcttatatctaggattgttaaagctatccttagatatagaggtcactggatacctatagctagattataaatcagactttaactattctaaggatctctatatcagtgactaatagcctctaatctactatcaatcgctatacttactaatactagggactttaaataggtaacctagctaggcgttatagttaggatctagttattttctacctttaactatccctaaatagtattattaatataggtaaggcttcgtctaagaggtttatagatcattttatactaaaggtagcgaattgtcattctaagtagttattttcgatttaagactattcgaagtatatactactatattaatatataggtagataccattatataggccaaaagaggccagtataaaggctagccggctagtaaaatctatattctcgaataaatcagacaactttttcacaactaggtggtatacaatcggatatatcgtcagtaagttagttattacctaatgtgattagatacagtcgcctatacctataagtattaattctacctaggtagaataagataactcagctaattctaagagaatctaggcttagcttagtataaccttacggtaacgtgataataggcttttagatctttcggctctttaataggaaacagatatgtttatactattaggaaggcaataaaagtatataggttactaactaataagctaggtcaaataatatattaagcggtactagcttatatagatagtagaaatttctatctagtaaaggaaaggggcttagaatactatatatactagtggagacctatataccgagaacagatggtataagctttaaaacctgagactcagataaatttagttagggtatatttagttagggctattagactagtaactagtaccctactcctagtaggctcttattattataaagcctcctatcctactcactgctatagtccttctcttcgtttctactttcttatttatagtattcgtaaacagctatctataataccgatatccaagtatcctaaggtaccctctccgcctctactaagagatatactatatacctcttatacttataacaaccttatagggtagaagagtatatatatccttcgaatcggaagggaaatataccacaatatctagaggtatcttccctattactagaataatatctataatatatagatatatagaactatcgctagtattatatatatatactttataaagtaggttaccttagctcacaactaaacttaaagctaatatatattctctagtatactcctagctatagcgtatacactagatatataccggagaactaggcagttttatagtattaacgaagcgctcttcttatctaccctagcggtaatagtattcagtatccttatagtacaacctcttactatcgttagtattacagggttaatttctttatttaactatactatatataatattataaagatctataaaccctctatataccccgaatttatatattaggtaggtatatagggcgctatattctattagattattactttatacaatatatatgactatatacactacgctacagatttcttaagcaaaacgttcggtttttatatcggaaccatctatatcagtaagttatacttccgaaaactaccttcttaatattaagaagaataatacctaactctaaggctaggtaagggtatagaggaacttatcagcgagttcactagtaaggggtataccgctaggtttataagttatataatcgtaatactatatttcctaataatctatagcctagagaccattaggtcgagtactatctagaggcctacttttcaggatttactagcagattatatatatatagtatatagagtctaattatactaggctactatttagaatcacttacactctttcttatcttttctatatagattagaacaattttctggataggattttcgtatatcctaggtcctctcaaagttatagatatatcctatattcctattagtaaagccttttacctaatatagccgcaaggctagctaatttacttttaggaactagacactaaatagatttttatagcgctactatttagatttctgattatattacttttctattataattatatataagaccctatctagggaatagagtcttactcctagctataacgctaactttatagctagaacgtcagtagcctaacggtataagtacagcaattcctactaaagaagcctactaggttctattaggacttttttcttcttagatataccacctttattttaggtattattagtatccctttccctaacggattggttctataggtataaaagctaattcaagtcttcgaccctataccgaaattattaataacctatactaggcacctatatatatagattctttaatagtatataaaacagatatctatattatactaactaaggaaggaaagggcgccgagatccactgtataatagttaaggcaactacggtagtagaataatatatatcgcatttcgttatagggctagctattattaatactataacaggccccctcctaatcatcctctatactatacctacagcggtattcgtaggaatattttttattataggatagggttctattagatctagcggtattatatagaaagcgatttacttaatactagaggaccgttttatataatataataaacctcttctaagggtacagaaccgtaaggtcctactatagattatatatcagctcattagaattacagcctatattactatctctaagacaattactactattagtatcctctttcctcccgtctagctttactaaagcgaataactgatttctatttttaggttttcctatattaataatcgctttaatcctattctaggtatagattattcctaaatggttttctagggataaaataggggtactagatgatataacggctaataataaagctattctagctagtcttagtagatcacctaaattccctagaaaggagcgtctttaggactataggactaagcgtcagtacttagagtagaagaagggaattagtagataataagccagcagtttatatcgttaaggtaggtcaatttccctaggaactaaggactcgctaaactttatatatattaaaggacttccctaacggatattaatattattatagtgctctaagtaggccaagtttattacaaagattctaagtacactaagctcttcgctctaacttttatatcctatttatataataaaagcacatcattttatattattatagcttacctttatttaaatatagtaacttaatttaaataataaagtaccgattagcttatattagtactaaaggtatacgaaaccttatggttaaggtatactaagagggtaagtacaagtattaatagttataggaaaaagaatagtagaggaaactagtccttataactctaatagtagaattattatagaccgaagtaatattaagcagtaatttcggataaatatatagatagctgatattagatcttactctagcctcctctgtaaaagtagattagaccgctaagcaattaatcaatatctgcgctttattataggagaccattttatactaacctttaattaagttgtataatcgggtatcctttagtccttctataacactgtcgctaatagtttatagaatcttattcttaataataacatttatttatatatcccaataatgcctaggagagctatactctattaaatatatgataaatagtatattattacaattatcggtcacttttatctctatatcgctttacttaataactgatattataaacgaaccgccgggctactcctacttttataccttacttaataaaaaattctaggtcttagtcttcgaaaatttgcttaagatcaagacagctttcgagtgctatatcacatactttctatatattctccttaaaggcttcgctacttacctataactagtactagatagtatagttatttacagtaatatcaagaagcctaaggataataatagaattaatatagctaggcgttaaaagtataatatcattactagtaggtatagatattaatacttaagattgagctaggaagatattaatatttattataaggtatatcgatctaattataggattatctaggcttttcttccatcttttaagccactggttctcctcagtataaagctatttataaagactattcagaacgttattataggtctcgattactcctccttaatctatatatttaacgagagtttttatataatataatcgtaatttatagtgttttcttctataatcctactagcagtattactaatataccctataattctataagatcgcgcagactttctatacaaaaccatagaactataaatatagatctttttctatattatagtaattagataaattaataataaatagaaacttgactaataacttaatattactaatacagttttatacctatataatcgattagatcctctttaggaggtaagatagggaaggtaaggccaagtaaccagcttatagttaagtaactaaaattaactctacctattactatatagataccttcgcttttagatatcagcctatctatagattatacaaataagcttaatccttacttttatacttgatttcactttaaataagggtttcttctcacatttttcaggatacttagcttattagttagatatatcacaatatataccgtacccttataatacttctacattctatatatagctatatccttctacctaatatatctataccgctctatacctactattactatagcctaggttagccagaggagtacactacattccctaatcaccccccttaagcttgtgcgtatagaatcgaataaagagactaacgctaactaggctaataatagtattcaaaagaatcgcctagacactagtgtagaaacctttatcactaatatacagagtttcgttatatctaatttcaattattaggagcctaatctcaccgcgtactattatagtagatcctaaaagtattacagctagctaggcccgtttctatatcttccccttctcctaatcgctttatttaatacttaggatctttttcttaacttttagtttcccctatattttatactcttcgtatgactctttataggattttacccctaaagtaagttactatataggtacctagattctaacgataaactatttattattttagttcgattacttaggaacaacttttaaatatattagtatacctttataaacgttattaggagggtaaaaacaattcctttctaaatatattccttggtccatagctctaaaaacggaattgtaaatctaatacttaagaagaataatagttccattaaatactactagggccctaacaagtatttcttaaaggtataaataaaagtagggcttttatctaccttacgcttaccctcctcgcggcttagaataacaaatggtcccttagggtacttactcagtatatatataagaaatatacctactaggaaggtactaaataagacagatatactagtaaagctagcgatagttataaaagccgaaagaataagggttataaggataatattagagatatagtcgtagcgtataaagcgatattcaatgaactttcggaaaaatggtataaagacccattttgtaacaataggtattacagcagctatacctatcgataccactattagacacctaataagccatcctaaattaatactatcgctacttcctaaaagtttacctaaatctctaattatactatagatagttagcttaataagtttattataccttatctcatttcagataagtattataccttaatataacaagtcctataatattattaataacagccgcgcttactaaaactgaccctactcgagtctcagtaaggttaactaaataggacatagagctgatcacagtaaaggtagtccctaaatattttttagtaatagttaaactaacgcttctagggggatagtttaccaagtaaagtagtagaaagagatatactaataataaaggtctcaactatacctagtctatattaactgataactaaaaatttagggtaaataaaaccaactatatctaaaaccaagaaagagcaaaaggtatgaaatactaataggaaataaaaccctagttacagcgctaattatacttaaagtaaagttctacttaagtaagtctacacaggtactaagaccgcctagaataaatgacatcagtgtcctaagaagctaagaagccaagtagcgaagcagctataataaaaattttcacttaccttcgaaaataatcaaaattagcccaatatatcctaggctaacaaaagtctcttactagtgatattaaagaatattagctaagggtactctgtagataataccgataacgatttaacctataattccagcctagattgcggtcgcggagacctaccttataagggaaaggaagaagaagaaagaaacgagaataaggattttaataactgtaaatatagattagtgaggaaatgagcatagatcaatcggcatataattaggtatatacttcctggttcgtggtataggaggaaactaccggctatactcgagtttcgtctttagagtaagatttaataagattaaataagaaaattggagaagggctgttagaagtaaactaaggacctcctcctacgtgacacaaattcgtgtccacctgttcccacggttccatctgacgccgaccttttgccccaatcttgtcctagtccgctcggtcataggcctttcttattttggatgtggggttacgtggggccgcgaggttctattctgaataggttgcccggtgatctgacccgtagttctataatttgatgagggggttaggcttttcggttactgtttgatcgattgtggacgtccacctggctaagggaccaatatgttactgttcctcgtgggccataggcttctaagaaaccgagcagctcactcgcgtcctctgtgaagcgaggctaaatgtggttaccgccctattttggttggtagcggttgaagtctccggttgtccttctttcatcccggatggtggattggattgcgccccgggcagttgtcagcgctgatcctgttgatgcctcgtgcggggtgtgtagtggcacttgttggcggtagactgatcagaggagaatcagagagtagctgaagcgctggctaacaattaacgatcttttcatggcggagtggactccggggaaacgattcggacttttgattttcctcgcgttgctcataaagatgaacaatcacattatgtatacctgtagttaccgactgtacctatgcgaaagagttcggaggtatagctgatttcgaaaagtactgtacctatgcgtcctatgggactgccctgatctgcgggagttgcggcgggaattacgggagaaagtcggcgacgcgtttaataacgtgtcgagcttgctagggggttctcaagaagaaaggagaggtcagatatatcatgcctcgcgagccaagacggtggatgctgtattggacttcgcggaggcatcacaaagattccgcagtcgcgcgccacgagggcagcttgacaacgtgaacggcaattaggccacgaaaggccttggcgaggctctaagttcgttccaggaagtggtacacttcgcttgtaggtacaaggatatatagtcgtgataattcctatgcacgctcttggtcgctcctaggaatcaggcttatcgttcctagaggacttatagctcccaggagtgggtggtatcgctcccgggaacgaggagggggttttccgagctttagtgcgttaagtaagatcggtgccggtggatcacgaatcccgggagcatgagggcttcctgtgagggtctcacgtatacgtagatgaggactgtgtttcgtaaatggataatcaatattaagaaaagctatagtcgactctagatacaagacgtagcgcgaggaagcaaaagaaaggtagcttcctcgcgttcaggggaacccatatacaccatgtgggtcccgcgcagatcatttctccatgcttcatgtatatctctgacacttcccggaattaacaaataattcttggaatgtatgaacttcattggatcgcacatcttgaagattaatctattaggagtgaaggctcccgagttgacacaaggccaagtactggcaatggatttactccgccatggaaagaggaaagtatgctttcttggattaagccaatttaggaaatgttacacttccgaacttggaaggacttaaagtgaactgtgagagcagagagctctagactagaaaaggaggttctagttgagaagagattctggaaaaagtggattgcgagagcagagagctctagactagaaaaggaggttctagttgaaaagagattctggaaaaagtggattgcagagagcgattgctctatcgatatttctcaacccatttctacttttcactcagaacaatgcctgagctgtgtttcccaagcatgtagctcttccaacccgccttttctagatcgatatctgcgtctccagacataaacttcatgaaaacaccatgtgttacaaccacgatatgtttcctaggttcattgttcaattgatcggatatttctgcgacacgagatctcactctcttcgcccgctcctttactgcctcatcttcaggggcataaattccctccttcaattgccagccttccggtaaatctttgacgcctagtcccggaaaagccttcactagggccggacatgtggatccagtatcacagggaagcgcacttcgttcctgcaaatctggatccaagataagggtcgcaccattttcgataccatggccagagtctaggtcgaaatagcgtttatcgaggacgtgtgggaaagcagtgagcgtggtttggatggcacgccgcagtggagaagtgaggattatgcccacctgtggagcatgaggaaacgtttgggtgagccgtgaggcttgttcaaagccaagaggtgttaggccagggtcaagttgggagaagtctttggaaacattgtgggtagattccgcgtgacggacaagatggacttccgaagtcatagctagagaacttggaattagtagtgatctgtttgcaaatcctccctttataatagttatagcaacttaatgaaacaatttctagagtatattgcgtgattcttcctcgttccttgagtggtcattattataaccataaaaagtatatccgtatctcgatgttctaggctagagatattagtaactgccggtgtaggtccgaagtctatcttaaggcccacttcattacttcgataatagcgtctcgtaaatctaaaggggttggtagttatagtagctacttaggacatgaatccatcctttctttctgcttctcctatgacagtcatttaaaagtagtgccagtacattggtctaagggttgaagctgctacgtgacataaagccacggctatttatcggctgaaaatcgggggagtctatcccgacggatccatccctctttattagtatattgaagaaaatggtagtttcacaaattgacccgtcgctttgcaccatatcacacataggctgaataacgttggctaccagaatatgctatcgtcccactactccataccagcataaccctaagatagcacccattacaatcgccacgggtggggcaacattgaaccatgcgctccccgaatatgttactgccgcaacaaccacccaccatggttccttacccagactctgtccgtcgcttctttcagaagtcaggtatccaatctcccacaaccggtatacagctgtatatactagcccaactgcagtggcattcactcctctgaggaagtcgaccacatacttcttcttccgcaacacgcgccagaagctttggattgcaacggccagcgtgattcccggaaggaagattcctaaaccgccgaggaacgcaccgaaggcggtcgggaattgcgagcgctgtagtgctagtgctcccaaaaagacagcgaagttgaagttaggaccggggaaggcttgaataatggcaaggccgatcaggaagtctctactagagacccacccgggatcgacgacataggagcgtaagaggggaatgacgacaggacctccaccaaagataacagtgccggcaaggtacatattggcgaagaggtctaggaccaatgggggtgtggtgatctggcctctggcaacaagaattgcgatgaaggacgctaactatattagtgttgacgcttagggatcttgtcagaatggggtgcgcaccgaaaaagagaaacataatcagaagtccaatccgaatccgaataatgtgctgttgtgtgtcagcttcaacggacggcattgggcttgtagtatcaactgtgctctgtggtagttcctcgactctaggatccgtccttcgcgatcgtgtcgtctcactcctttggactctattctctcccagagttgtatcatccatggctatggagttcccatttgccttatacggttcctggggacgatgatgtctgtccttccacgcgagttttgctctcaaaaattgctgatacaaccatccatcccagatgctggtgaggaaaccaccgataaccatcagcacgggaaaataccagagtgcattgtaacagagaccagcacatgcgccaaagatcacgaggatacgggacagtttatcgcgaatagctttttcggacaactgtacagccgcaagtgcaacgatacccactgtagaggcattgaggccagaaagtaaggagtaggcaggttcgggaagagtttcactcatgttttgcaccccaagtgagagggcatacatgccaactgcgccaggaagactgaaaccgttagttgaagtctacagatggcgggcattgcagcataagggtatgaattaatcacctccaaagtagaaacacaagcatggcaggaataaatcctgcgtgtaatagggctaggcaaaaaaccatcttcgtgctaccgggacccggaagaccctgacagatagcaaagagttcctgatactatgaaatttgttaggaggccctatgacatcgggacacgccaacttgaagataagggagattcatacagtctgttcatctacccatttttccttgtcgccctttccctccacgaacctgctgtgtagaatctggaagtgtactggtggtcctccgaaggctgtaaagcctagatcccatgtacgcagaaaaacgtccaacagacggctcggcaggggctttcccgatcccccattttcacttgaaacccggcttccccgtttgtgattcagacgagagagggaagagaggcctcgggaaaagggggcgaggagtggcatactgctccttaacagctgcgaagatagatcgctcaagcacaaatagtaagatagacaaggaggatgagactctcaaacgtgagcagtgctcctataaaccatcgccgtgcgttctaggtcaaatacctatgtagatacgcgggatccatgaatggaatggatgggacgtcagggagccaagatgtttaggtaagctccagcattgcactaaagtcaaaacaaacaaccaatcaaagacaggcaatgaagcacgtgctgtaccaaaatatgggtctagaaaccctattcggaaggggaatgtcactgcatggcgtttacttgacggaggcgatgccaagcaatggaaagagctttcttggtagtcatccgagttagcggagtcaaaatcaagttaaagcgtctctgaatgtggcaagttgatatgtttatcatttgtttatgcagcctggtcaccaactcttggcaagtcccacagggtaggcccctggggtggcccctgccctaacaggtataattaggaatacaaattttagaacgcgggtaaaaagagcaggcaacagaaagaagagctgattaactgggcaaaaatatggtgcgaagacacagtttgaagagaggcaggatgttggtgaacgataaaatgtaacgttatttgggaaatgacgaagcatgcatcttaacaatgcgttctacgttatcggtagaataaacaaatatagacacctagtggcaagttacaagtggttaagccaacaagtacaaggattgtttggatatgatgcctggggaatctggcataaaagtgagcatgccataggcccacaggttttttctaggtaggtgggatgaaataattcttgcaacagagttggggggtgcctgagtattaggaaattcacttggtttagagtgaagagtgttccctagctaagcatactcaataaatacctccttctttcactacgtcgactcgtcttccagtactcctccttcagttataatgatcacgagcaccggtcgcctaaccgagtagaccgagaagcatgtggctacagtgcttattcgatcaagatccggatcttgaaggccgaacatgagctatgccgttacaccacaacggtagttggcggcaaagtaccacatgaccgttgagatcgcggaatcatggtatatcttgggattgatattgtcccgtgatcttttgattcgtgagattatcatcgtggacgaatcgtagtgtttcttatgatacaactggtctgacgggggcttgattcatgggaagacccttagagttgctgaaggatcgtgccatttcttacgacagcgatggccgtatctttttgcggttcgcaagagagtcagaactcgcggaaaccgtggtgttctctaggatctgccttttcgtgtaggttcccccgaagggtctaagattataaaacctgtggtttctcctatgatagagataatcagaggacccccgccttcgggagagaatcagagttcgcggaaaccgtagtttttcttacgacaaagagaatcagacgatcttttggtttatgagacataaggggcgcgtcaaccgcctaataaattggttcattattgtgcggcccatgcatggccggtttttatagaatcacccgagccacgacgaaaaccatgacctttccgcaacctctgtacgatactccgtactacggagtccgtagtggtgttatgcacgtgacttttctgacttgtagattgattggttattgatggcgagtttgtggcatttagcctcgcttctttagacagttgggagaaaacaagccaggccacggatcctttctccatagaacgtgatactgtagccaacgatgtagaaaaatgaatctgacaaatgaatacaatcagttcgagggatacagtataaatttcccgcgtaaagctaatggatcagaggaaccaatgtatgattggggggattgggtactctggtattcctttctccaccttggagtaacatggctgacgtcacttctccttgtgacttcataagttcgtgcttggtgcagcgacctctccgctcgcatcctaggggactaaatcaactcatagaagcttctggagcattggctgccatagtcgcagctgtataggccattttcgatcatgtacaactggaagcaacccaataaggactttgttgctttagggtggggaaaggagtaactaaaagccaattatatttctgctacaatgccattatttcattggtcagttgttactcctttctccaccttggggtaactgactctccagtcgtcgaaaaaagagcggggccgcagaaaaaaatatccagcttaacacaatactttttccctcttctcgtatttggtcaggccatgccatgcagatggataccccggttgaaagggccatcaagtataatgcacaaaaccggaccagtgggtatagtacccannnnnnnnnnnnnnnnnnnnnnnnnnnnnnnnnnnnnnnnnnnnnnnnnnnnnnnnnnnnnnnnnnnnnnnnnnnnnnnnnnnnnnnnngcaaaaaccgggaccagtgggtatagtacccactggtccgtttcagtcaagaagtttgcggcgtttgatcggagagtcctggcttcctctagtcttgctggactctctaatcttgctggactctctagccttgctggtctctttagtcatgctggtctctctagtctagccggaggtctagtcttgctggactccctagtaccttgcttgaaatatcatttgtgaaaataaaaaataaaataaaaagaaggccctaaaggccagaacctaagatagctacgctatgcagttaaccgaattttccaaaggagcattcattatttactgttggccctcaaaatcagaaattccctgttataaacagacctcgacttaatgcgttcctcggacaccattaattggttggaacgaactattggaacgaactaagctccctcccttccgtgctaggcttcaaaatgggcgtggcaataaatttggtaggcacattttacgttcatcacctactgcagtgaccgtttcagagttttgctggtcatgaactcgaatacccgcagtttctggaccgcggattcctcgatcgtccctggtcgtggttttcaacgcaaattcgttgcctgctgtgaactcatcactctgccgggggccgtttcaggtattcgttgaccatgaactctaaagaccacggttctggagcgcagcactccttttcaacgcgaaaacccatgaacatgaagagagccgtgttgtacctgtttgtagtcttaagaatccctgagagccattcgtctatacctgcgactatttagtgccctgtttccttgtcttttccaacagtgactcgtctcttcatatggcttccgctcctcccacccatgtgttttttccttaaaaagaaaaataggtgatgaaaaggaatcaaaaggatgaaaagaaaggccgcggtaattatcattttgagcgacacggttcttggtgtcgcaccaacacctcgcgtttcacgttacggaacctactccagtaagtccctactctccagtaagtccttactctcattcagcttcaaagttacatatctctcgcccagagacaacctaggataatcttcatcctaggaaataccacacttttgtggtttcttaagaaattctctatcctaagatcatctgtatcctactaaataccacacttttggaaaaccgtggtctgcctcaggaaacagattgtctggagaaatgaattagcctgggataacagaaccaaaaaaaaccgtggtctatctcaggaaacggcttgtctggagaaactagttggcctgggatattgaaaagacaggaaaaccgtggtatcaaagtttggccgcgatcttgtggtttcttaagaaaatttctatcctaagatcatctgcatcctacggaataccacacttttgtgattcattgagaagttgtgtacagacgcactcgaaatcagttcactgatttgttctctttgattgcttttcaaattctatttttattgacgctaggcctaatgtagccaaagaaaggttcattgcccttttcctattcgacagtcacgggtcggctaggccagatgtaggccgaagtggatctggccaagatttaagaagaatcaaatagaaaaaaaaaaaaaaaagatgaaactgatttcgagcggacctgtatcttcagcatcctgtagcaacccggatccaccctgtaccagcagaagtgagaaacagagttagggatactaaggcgtggttaacattaccttcaatatacattacttgtggttgtgtgccgagcgggagctaaccgcgtaccgatggtggacccacatacgggagggcccgaaccccctcccacaaacaccggagaaaaccccaccagcttctcagtcgaggacttccagcctcgcgtaccgatcgagccgcttcctgagtctcgcaaaagaacacggagcgatggtgccttcacaccagtggaaagtacaggccgggttaccaccagggaagtgtggaagctcatcgacagcctgaagttaatcatccaccaccaaactgcactcatcgaatccactaagaccgagatcgaggaggtcaaacacgaccagaatgtccttcgtgaccagaatgagaagctctacgaggaaatcagagctatgcgagctcaaatcgacgcactcccaccagcacctgcgtccagaacatgggcaacagttgcggccagcagcaacgttgcccctcctcaacaaaccgactcgcggccagacagggacctgaactgcgttcgtattagtacccaacgatcatttgtggatccagcggacaataataacagcgatagaaacaccttcggccgataccttcccacagattccgctaacagccacatccgcaccgcgctgatgaacgctccaacaactcaggacgcccaggtcgccgggattggcacaaccaagacaggctacgtgattcgatttaaggacaccgagtcggccgagctggcccgcaacaacaccgaatggttgaatgaactaggaaacaatacgaaaatggtgaaaccacgattcggcatcgtcgtgcatcgcaccccaacagagcatttcaatttagagagtgcaaacacccacgccattgagaaaatcatggacgaaaacagcctcacgggacagggcttccaaatcgaggaggtagcctggctcaaaaagaaggacaagatattagggaaattcgcatctcttggcatctggttcgactcagcggagggagctgaacgcatcctcaacaacagtcttttagtgggccagagatacattagtagtatggaacgccgcgagattaagaaaaagagatgcttccgataccaaagtttcggacacctagcgtggtcatgcaaagaaacaccacggtgcggacattgtgcgggccaacatgaacggcaacgatgcccaccgggcgtcagagcgaggtgcctagactgcagtggagaacatacaactagagaccgacagtgtgcgacccccgcatctttcaaaccccgtcacccccgtcaatgctagagacaaacctacaagtactacagttaaacattatgaaatcgggaccaagaatggaggccctcattaacgatcatcaaagccaaaacctagatatactcttgatccaggaaccgtccattaccacctaccgcacacacgtcaaccacagctcctggcgcctctaccgcccaacgaccgagaccgatacagcccgatttcgcagtctgatctatgtgaatcgtaatatctctacttcagcataccgacaaatcccatatgaccacccagatgtcgctgcgatcaagatctggacttctgactctcaaatactattcttctccgtttacatcccttctattcccttatatacagacagtaaggcttcagcagaacctacactcaccgcaattcaaaacacaatcacaacgactctacaagatgactaccgatcaacaagcatcgttctgggaggagacttcaatcgccaccacccaatgtggggcggcaactgtattcaatcacaatttatcgaagacgctagtgacctgatcgcgttctttcaagcaaacagtcttcacagctgcttgcctcggggaactgcaacctactggtcgcttagcgatccagggaggaactccaccactaaccaaacagtaacggatcggccagagctactagtcaaatatcacctttaccacgaaaactacagatcggaccaccgcgccacgtactccgaatggaatcttcaagcccacagcaagcgaaccccgcagacaaggaaagcttacgaacgtacggactagaacaagattggcgaagaattgatacagcgaaccggcccgtggaaagaaatcaaaactcaaccagcacttgacgaggccgtccaaaacctcacagaggccacaacggcaggtatcaataagtttacacctgacatacgcctgacaccgtactccaaacggtggtttacgccagatctgaaagtccaacaaaccaaagtcaaccaactacgtcgaagatggcaggaaaattgtagaatactcgggcgagatcatcctcactccacaactactttccaagagatacaacaaagccaacgagcgtggactcagacgattgagaaagccaaagcatcacattagaggcaatttctagacaaagccggagagggaaaactctggaaagcggccacctacatgaaaccaagggagacgtagggttgtatcccggcactaaaggtagacgaccaagagcttatcgagaacaaagacaaggcgcaggctttcctagattccttcttccctccaatggatacccccgaggccaactcaacaacaccggcaccactagggctcccatggcagcctctcaccaccccagagattgaacgatcgctccaagcagcaaaagggaccaccgcaccaggcaaagacaagttaccgatgcttatatagaagcacttataggtccacctgaaagataacattaccaggattttcaacgcatcactaagtctagggtaccacccgaaacaatggcggaacgcaaaaatcgtggtactacagaaacccgggaagccagactactcgctcccgggggcctaccgtccaatctcactcctcaacacactaggaaagcttctcgaagctgtgatagcccgaagactctcatacctcacagaaaaacataggctgctaccagacacccaatttagtggacggccaggaagaaccaccgaacaggccctgctggtactatcaaccgcaatcaaccgagcatggtacaaacacaaagtagtgactcttatctcctttgacctaaaaggagccttcaacggagttcaacaggcaagtctcaatacttgcttgcgagctagaggaatccccgccatagccagaaagtagatagcgagctttataagcgaccgatacgctagcataggatttaacgactaccgtaccggagtatcactgttagagaacgcgggactggcacaagggtcccccctctcccccatactcttcgcgttcttcaacaccgacttagtggaccaacccgtcacccgtcacagtggcgcctcagcatttatcgataactattttcgttagagagtgggccgctcagcagaggagaatctagcaaagattcaatccaaagacatcccccgcatcgaggcataggcgcgcaagactaggtcctacttcgcagcccagaagaccgagctcatccacctaaccagaaagaaagctaagcacctacagggtcaaatagtagtaaacggcacagcagtctcaccctctcccgtagccaagttactgggtgtgaacttcgactaggaaatacgatagaaagaacacgtgcagcaagcgattaagcgcgcaacgaaagtcactgttactctcagcgggttacgacatttgcgcccagatcaaatgcgacagctctaccaatcatacatcacgccagtgctggactacacatcaaccgtctggcacaacccattgagggacaaaactcaccttcgacacctcaacacagtgcagagaacctcactggtccgcatcctatcggcgttcagaactgtggccacagcaaccctagaagtagaagcgcacatccttcccactcacctccgtctccgccaccgagcacaacgcaccattgcaaacctccatacgctgccgcgggaacatccgatctgggatactctctcgcgagcccaaaaacgtagaaacaatatcgggtcgtacgctcgcttcccgctggcggaagcgctgaagaccatggacctccaaaggctcaacgagctagagacaatcgacccacagccactgccaccatggcgcctcgaccccttcgtggagatcgaagtcggttcagactgagaagtagcaggagagcaagctgaggccgtccgctcaacatcagacattgtcgtctactcagatgcctcaggacgcgatagccatttaggggccgctgtagtagcattaaacgtagatatagagatggttgagtcctaatatatccaggttagaccgatggaccgctggtcggtatatgtagcggagctaataggtatctatcacacagtcggcactatgttcaagatagcctaccagtaactaataccggaaggtcgataaactgcgacaattctttgtgatagtaggtctaccttataagtaattaagagcgtaagaaataagttaggataacggattgtttatacaatctactaagccgcgactaaggtcaaaatagtaggtattatactgcgcctctagtaggtactaggatattgtaataatcctagtaacgatactatagactaaatagtaaagtataccgctagccctagtaagtcctatcccttccgcctactacttataagggagaagggtttaatctatagtaatattaccacttagtaggagtataaatagagaatatctagtaaaggcggttatctatagaagattaataatactctaccggtaatatatactaggaagctatatagaagtctacctaggggccgggtatacctactaatacagctatatataggctataactagctatctacctactataagaagattagttataataataatgaccgttatagctatagtatataagaaacagttacttatatacttatagactgcctaatactagtagagctacgaagaaatctaaagagagaagtaggggatatatttaatagtatattaagtctactaggaggcttaaaataaagtaagaaaggtaaactaaatactatctcgcgagctaggatagtctaggctgtactagactttactaaggcgttatactggttttgcagttatatactataggggtagcctaataatagaaatagtaactaggctataagaggccttaacgaggctctaagttcgtttttaggaagtagattactttatatatatatatagagatatatattattatagtagcctatatatcgctttttattataagaggttagggtaaataaaatatatatatatatatatataccctatacctcctatcggtagcggtagtacagtggtaagtaccctgaaggcaacctataggataataaattggtcacttgttattctatagggcttaggttcaattcctaataccagtatatcaattactactattatatctctttggagagacctataacctaggggtagtggagtaccctagcctttttataggttaaagtggagacaatcataggccttactaggtaaggctcaaagttcaccgtttaggaagtttagaacaatctcagtggataaatcatcatatatttataaaaagtagtggtagcctacatatcgcttcattgcgaggggtcagggaaataaaacacatacacacacacacacacacaccctgtacctcccaggagccggtggaccgcttcctaggagcatcaaggttatgtcctgggagccctatagctactacgagtacgccatcacgatcccaggagcctgcaatactataccaagtggacgatcctatttcgacaatggcgccagcagtacatgaacatatttagaatgtgtttaaaaaaaagtattgtattcgagtgctcgagtaattgtgaccttcattcgttttgacacaactaattgcagcctggtttgaactaatggcactctgaatgctgttctgagtctcgctaactctcgggtaaactaacttccgaatagcccatggccagtaatgtatttgctgttttgttccaccgtcgacaaatgtttgacttgtctggatcaaagccattgccctggcttgatcctgaaaatatgcagggaactgtcaagaagataacaaggctcccagggacactgcagatggctctagggatagatccccggctctaggcatgaaattgcgagccctagcagcgttctctacaaggaccgaacaaaagaatcggcaaagggagatctattttccttttgtccgttctggccccagggctcggaatggcgcggagcgctgtccttgcaagcaggttagaaaaattttctgtcagagagctggggggtgcgagactaataggaaacgcacggacctatggtccagatggaaaatgtgtttttgttaaaccaatgccattctatcaatcctacttccagagagaggacgctgtttaaactagcaccttctcaccactacctgcgccctcatattttgaactgtagtctatattgctctctcaacatatccgtttcctatattcgttgaaatcacaatgagggctctttccagacccccttcgttcaatttcagtagaggcatgaccaaggaagaatcccaatggaggcttatcattgaggccaattggtcgaataaggcgccccctgccccctgttcaactagaaacatacagctcatttaccccgctcgttctgagtttcgccgctctttccccctgtgtcggagtaacgaggaacagtctcgcgtcggcccggttccgttcacggcccgggcgatcatcagcaccacacataagtttgtcagataagctatctccatgatggacaccaaggatcgaagggaaagtagtcacttttagtacatagttcatctactggctcattgcatttcaatggctgacactaaattgccagtcactgcacagatgacgtgttccggccgctttgcaggacagctcatacttgcatttccctgctcctccccactcccggctatatcagatgtagtcatgcctcctctctcgtttatctttcataaaattcttgtgatatctttagggatcacttcatagccagcaaagttacagtaatgccaagaaatggcaaagaagaaaacgaaacagcgtaaggccaatgagctgcctgggcgacccctcaccccagatatttctcccaagattgactatcaccggccttcatcatcgtgagtgttttgatagcattcaaatgacgttgtctaacctattcactggtgctacgaatcccctttggttaccctcattattgggagcaagcgatatggcattccggctcagttccttcggagtcaccaaaagttcgcccctatatttcttggtttatcagattttatcatgtctaatgttaataaagacatcgggcataccgtggtacatttcttatacacaggtggctacaagacagtcagttcacctcttggcgaaggcacatcagatctcgctagagagtacaagaggagcgttctagtctaccatgcgtcaaggacttagggccttactaatctagaagttcttgctcagcaaaagatgcagcatttagacgaggaacttccaattcttgaaatcttacgggtcgtgaggggggtgttctcaagcctccccccaggtaaagcctggcttccaggctacattcaaggaaatttgcagcatttacttaagccaaatgatccagggcttggtttacgtgagttttacgatattattggtcaagatcatgagtttaacaatgcggtgataaaaatggttcttgagatactatctcttcgcatatgttctatgaaagatcagcacggtaattcatcttcaacaaattaagtataaggttaccaagctgaaccagtcttcttgctacgtttttagtgaaaacaccgaatggcatcatctcaaataagtctcatctttcggggcttatccatgaagagcctgagcctgtcccagaggagcctgagcctgtccccgaagagcctaagcctgtccccgaagagcctgagcctgtccccgaagagcctgagcctgtccccgaagagactgagcctgttcccgaaggcctctctattgacagtgatggtagactttggacgattccccgagtgcctgctgaggttgatgactggccgcgcgcttcttcgttgcgcggagctacgccaaatgccgaaatactccaagaatctattgatcagggccacataacgaggatttcatgctcggacttgactttgtatgaaaattgggaaagtttgtcttcaaagagaagagctaaaagggctagcaagcttaggtctcgaggccttcctgttccaagcgagactggtttcatttctatagttgcagtttgagagcagcttcaacaaggcaattaaaccgtttacttcctattcatgaattcgtaaagtgccaaaaggatgtatattgatctataggcatagaggttggatttggggaaaattgggggtttttcgctttctagtttaatggagggcgacaacgatccctagcggctcgtacctctccgacgaccctcttatatgattggttcgatgttactcctttctccactttggagaggctcggtctccccagcaagtcaggacagaccagcgagtccgggtaggcaatggatgatagagggtgataactagacctaattgagctaataaagccgtctttctcaccgaaaaagagctgttcagacggaggtctatatcgtagggatcatcgtgatggctcctaccaaagatcttagggatcaggagttcaagggaacgtttacggagtacaaccatgatatcctatgaaatgtacctttgttttgcgccttttgcatcggcgaaacggtgacgatcaacagagacgccaacgagtgccccactgaagctagtgaatattctaccaataaaatattcagtcgagggaattttgtgacaggtatatttttttttcactccagaacatatccccgaattgtcaatctacaactacgccgttctgcggaaaaggaaaattgttctgccgaagtcatgattagctgacataagccaactataccgagccgatctgagagggtcccatcagctttattccctcatccaacaaataatctcatcaaaggcattcacttatcattaagcaacccttaggaatccacccaagccaaaatgacaaaattctctccaaaaaatcttcccgatgagtcgatgcgagagatgaactttctcgactcttccttcttcaaagagcccagcaaaagccttccgacaccagcgcaagtgagggctttgtcgaaagacatccacgcgaacccacagccgcagcctgttatttttgaagagtccaaagtcttcgtcaagtttggcccctatgtcacgatcgcagaagcgcagtgcctttggatgatcaaacgaacctttggtgacgaaattccagttcccgaagtttttgggtggcgggtcgacgaggagaactatgtgttcctctatatggagcttatccaaggacagacgctgcaggatggctggaatgagctcaatagccaggacaaaagctcgctctgcgatgagttatgtcaaatagtcaaccgtctgcgccgatttgaacaagatccttccgatcagtatattggtacgccccggtcaaaatgtgaaggttattatttacatctaatcgaatgtttccaggttccctggggcaccagcaactcctggattatgtttttcaatcatacccgaaaactgggcctttcttcaccatcaaggatttcaacgactggttttcctacttaccacaatcgtggcttcctccttcgaagaaatacaacgacccctataggtgtttgttaccggacagtggggtcattaaatttactcatggcgacctccaccgagggaacatcatcatctcttccagcaaaccagctcgaatcattgctatcgtggactgggcccaagcgggatggtatccagactactgggagtactgtaaggcactctacacttgttggtacgaggacgagtggcggcgagactgggtcgacaactttctaagtccacgcttacgagaatttgaggtcttcgcagagtacacaatggcaatgggctctgtgtgaaccagttctacctggaagtgaacgctactcaccgataggagaagtaagcatacttcgcagaaattacaaaacggcaggagaacgcacgtacgtacgtattataacaactggtcgcttggatctctgttctgaaatacttaaaatagaccattgaaaaaataaatataaaaacggatccaccttgatgttagcacaccacgagtgaggagccaaggtgtgggatcctctgcggtgaaaccgaataagccgagtagtttagcgagataaaatgtattggccagctatgtccttagataatcaaagggatatgcaacaaaagaacgtatgcgccaagctgcatctaacttcgccacaggccgtcttccgtcaactgctcgtacttaaagccaactcaggatgaattcaacgtcttccggcgggctgaagaccgattccatggtttgggggatcacgtttggattgaacaatctgaatcgcttccgctgtaatgagacttttcgagactaaatggcggacaaagtccatggtccattcctgacatcgcttattggtggtctgaagcagataaacaataagcacggaaaagtaagcattagtcaaattaggggacttacatcattgacaggtgccatgaagttctgactgatcccaggagtcgggacctgagacgcagcaatctcaatgttgcctctgggagttgagtctttggtcatcgctgtgtccacggagtcaacgatattggacgaataaacttggccaatcggaaaagtctcatggtgctgttgggtcatagcaggggagtagttccgtttgaactcgaggatgtagcccgccatgggtgcaccgacggcgtggatcagagtgcctcgtttagggtctgctgccgatggaacaaaaattgcaaagtgagctcgttgagatgaactattgcgaaaagagatgaggtgaatagttctggtggccatgatgttgtgaggtcctttttctttgcttgggtggagagggaacaatataatatggacatgagatgtagtaaaaatgcccaagaaaagaacaaggtctctcctcttatatctttcgatcatagcacgtcttaggaataattaggagtcccaagcaaccctaccaggcgcttcgaaggggagctaggcatcatcttcgtttcatatgcacgaataatattcgttctgagcgttatgttgattcccgagcgctgggattcatttttttttggcgccgcagagttggggcggcaatgctggaactttgagtcgtcggctatctttagatgaaaagtgctattgcaattcttgtggttgcttcggcgtttatcttggcaagtgattgaaggtagctgatacaaaactcgttggctaatctctggctttgtccaaattgggtgcctctatctaacaccaacaccctacactaaagcgggaaagcaaactaaatgaccaccattggccaaaagaaaagatgtcccagttgagcgactctttagtttggtactgagacggtaagttatcagattggggtaaaagtttattgagtaattaccgcatctttttcaagttaccgatgttgaatcagcttgcgcaatgtacccacaaaaatctggagcgttagtgaccgtgagaatgatccacacgagagaaatggcataaaataaaaggaccactagcggaaagcgtatggcgtcaatgaagtggataagaactttgcaaataaagcgcctccatctagtggcggctatgtgactgttcctattgcgccgagatgagtcaatcaaccacctcggcatacaaccacacaattgaatgatttgcccggaattttcaagacgaagatgaattggtacatgtggagtcagaagcgtttccatcgtgggtgttacgcttagatatctatcaccaaagaccaatagttggcattcatcatcctccgatttgaaacgggcgctaaagcaatcaatgaaaaaccactataccattcaaatttataataaaatcaacaagacccctgcttatccatgcgcaccgcgcgcgtaaatttgtttgagttattcgttttctgcttacatgtttgggcttcgtgggagcggagattgcctgatttcacgacgagattgttgtcgactcggataaccgtgcgaccgaacaacgaatgaagggtcgttctttcttgatcattcattgggttcattttcagaatatcggcgtattctgttgcatatcagaaattttgaaaattgagcagatctatgcggtaaaaagcgaatgaacggccggccggagaatttaagttcgaagcgctggcaggctggaagaggggaaattccatacgggaaaatgatgatccgacaaacgtccacccgtttcatcgtacgctcacaacggagtctcctgagcttcctttccaccataggtgacattatggcgaaaggccagcctcacatgcgggcgctccaaagcgacgcagggataacagatccccgtctgtcttgttggaatgaagagctaatcgatggttgtctagcactcaggcacaaatcctgggagcatgtcgctcgaagactaagaatagctgtgtacctttgtggatcatattagaaacgccgatactatagtagctaaggatcctgtcatttatacacatgtatgtaaaaagcagaggcgaccgggtttaagtaaaaccggtagaggcgcggttcatcacgtgaatcttcgcattgttttctcttattcctaccgcttttccggcgatcatgatgcccttttggattctaaaaagcatgggtttgttgtgctatatccctattcggatgtgaccgtctaatggatagaaaattgggttagatcaactgactccttcgcactatcattctcctcggagataaaatgtcctgtactttatcgcccaaggggtgcgaattaggtaaaaaccccactttgttaggcctaaaaatccaacgtcatattccgtgccccgcggttactttttaccacgctccaatttccctgcgaaagcgaacattcgatgccaaaggtgagttaggttgcaaaaatcgtttgctcatgtgctcatctaacttatttctagtggatgatttttcaccatctacattaggtcgtccactccatcctcacgcgtcccgcgagacctgatcggcctcctgttcggcatgactcaatcaatcatggatgagttggctacctttctcaaaagtgctagctggaaaaaggacaaggacaacctaaatgtttttttttgtgatgatgatggcctagagccgttgttagtgaaggcttccagcgagttgcctgattatcttcagcggcacgggtttcaagtgtggaaggtgttggaggaaactaagttcgtggaaaaggaggggattggaaagcaaggatacatcataccagtgacgattatctccggccaccctcgtttactatctgagccttcccagcctctgcttgttcccaataccccggcagtttttcaacgcgaacctgtcctatcaccagccttgtatcttattctcgctcttccaccgacttctacataacacaatgtgcggaattataaaatttgcagtattggctgagagttcgatcaactaaggtattgagatgggtcgcagggaaacattagagggtaatccgcgggagtgacggttcgttgttgatatggaaatagttgagggtaatctgcaggtatcgaggtggatgttgctgcgaaagcttgaggaaagtctgccggtgtaatcattgctatttggttgttcgtagcgctcattgggtcggaaaattgcttgtgaaaaatgagagtttatctttgacctgagggctaggaatggtgacttacaacttgaacatttcgctccatattgaattgggcactgttttccactgccgtatttccaaaatggggtatgagtgtttcacatgatcccgatttcgttggcatgtacacgggttcaagcccatgggtgtgaacttgtgacgtcataatgtccggccgattttgcaatgatatttgtgtgagcgaaggctcataatgtaagtcgctcacatcttgcaccatttccgaattctcttgaccactaaacatggcgttacatggtgatcccacagtggaagcaacctgtgtagcaactggtgctccagattgagaagacggggtccctgaattgatatgagaaaaagtcgccaacattttacaggacataccggcgctaggctgacgaatttgggggatatccgattgtggccaagtcctataagactgtcggttttcatccacaatatgggcatttgcctctgatagctgactctccatcactcgttctaatgaggctttgatcggccccagaacctttgcagcctcgtcctctgccaaggcatgaagaccacgtgtctgagcttcttctggcaatcctttctgcctcagatggttcaacatggcaattcttctaggcctcttcggcgatttgggcagctctttggtccagctacagcgttgtcagtgaagttacttctttctccattagattgccacttacatcgactcaccaccatcttgtggaaggagatacaatacccccagccctccaaggtcattagctagcagactgtatcgctctcctaggccaacccagtgtcttacgcgacgttcaatgtcggaaagtgagtcttcacagcccgaatctcttatcagatgggctatgaacattgaagcatcatcgtattggtactgggtacctggctgtacggcattcttcaagcgaaagaacgccacatagcaaatccggaggcggattttccccagttgctgttgattttcgcataagacgacgagtttgtagaaatcggcgagcggacagggttgcagcgaagttgggacatggcaagagaaaggcgcaatttgacgagtgcttgaagaaccatcgctgctcttttcgctgcttgttggtaagtacaaggggaaaagcgattcacgcttgtcctgcaggtcttggacgatttgtggagcttggagttgttgtgaggaacgcacgatggccttcttgatagcggactgacgagaagtttgtcggatacgctggggaatgtgcttgtatatgctttttgatgctttgacgttttcctgcttagatgaggattaaagcttcagataaatgatcgaaggaaactcacaatatctctccagaactcagactcgtctagttgatgttttccctcttctgcagccttattgcaagcagaaagaagactgtttgccaataatctgctttccacgatgcccatggtggttgctgaagttggaagtgaatagttgggacgacgtaagaattagtgggtacatgtggagtggtgggaggaggaaattgctggcagccgatcgaccgatcacaagatcgtactttttgccaggggaatgctgatcttacctcagcggtttggagtactacattcacaggcttgacccgattctgaataggttttctgcgcagaaaacctattcagaatcgggtcaagccccccacttcgtctcttgtcatcaccaacctgcactcatcctccaattgtcgccatgggtacatctaggcattttgaatcacttgcatggtatttggaacacactgctcttgatatgtctcttaaaacaaagaaagcagtatgtccagaacaaaaccgcttcgcgcctatcacgatggatctagtatcttatccccaaaaccaaaagagctgaatttacttcattcgacatcaattgccattctataattcaatttcatttggcctcgatttcaagaaaaaaagatttaccaccccttactcaaatacagacggttaaatgcatgggcttaccaaacagcctccttcccttcaacatttgcaggtccgacctcaggtatgctcgactttgagaccatctgatccaactatgaagacatgtgagtctggctccagaacttccagatcagcttttcaactaggagtacatgacacgaatgaccatacctacattttggggcatacataaaaagagacaattgcttcacacttggccaaatttctatatttacctaccaccaagactccaaaactgagaatatgacatgttcaaaatttcgatatttgctttcaaagtacatgtcccgcctcttctccccaggcagctcgcgcgagacagacttattcggggggccagaccccaatcgaagaagtatgcatgaatctgcgaaaggcgccaagcctttgacggtgaaagaacaacctgctttttctgcccctccaggctctggactttttgccaaagactcaataccgattcgcttgcatgtaagtttcccttttctccgggttaataccgagctctaaccaaacaagaccgtgcgaatttggtttcctcgcaatggagttcaacttatggaagatatcaaaagaaagggcctcggagatgtggttcttgatgccatcgctcttcatgatattggcgtccagcaccaagcccgggatggccatgacaacatgaaggatgcatatttattggaccttgcggtgctggagacgggtatatcacgggtttgggggaaatatgggattccagaattcattcctttgagcagcgatgatccaatcattttgcaacaaccagtcgaagaccttgactcgaaaaaagctctttgttaccagcgtctacattcaaaatgcttacgggagtatgaaaaaaggcagcagctcgcagaagctttgggatatgtgatgcaagggaacttaagggactggtatgatggctatctccaagacattggtggccgtctgaaaaagcttggataccgttgattaaatacatataaatcccttcatgctatgcaatttctctgatcaccagataggctcaattcaggacaagcaaaaagtcgaagttcgaaggggccgtctcacgcataatgcttgagtagcgaccttggagtattctcctcacttcattgtcgtgaggctgcctcaagaaagcaatcaagccccgcgacgcttcagaagacgaagcatcaaaatgccaggtcatcagtgctagcattagaacagtactgtaactgagaccgtggcgatgcaagggaccttaagggactggtatgatggctatctccaagacattggtaaccgtctgaaagagcttggataccgttgattaaatacatataaacccattcatgctatgcaatttctctgatcaccagatagactcaattcaggacaagcaaaaagtcgaagttcgaaggggccgtctcacgcataatgcttgagtatcgaccttggagtattctcctcacttcattatcgtaaggttgtctcaagaaagcaatcaagccccacgacgcttcagaagacgaagcatcgaaatgccaggtcatcagtactagcattagaacagtactataactgagactgtgcaaaacattcccctcgaaggcgcgcaagccttcctcaagagaaatgttctcatccagatacgtttcccgagacctgctgttcctcaaagccttgcaggcgtctagcagcattctagcatcttggctggagttttcggaaggtgtccatttcaagagtaccggggaatcaattctcaaaaagatcattgcctctagagcgacttttgccggtccatacaagaattggacaggaatcggggcaggcttatgatgtgagtatatcatcgccacgggtcaaaggcacggatactcaccatgactaaatcttttttttcaatcaaaatttatgatagatagcttccttcgacagtagaaaggagtctttatatgaccacctggatgtgttaaaagaacaccagcccatgcttaaagccttccgttcctattgatgattttaccatacttatcgaaagtcaaagctgtacgtcaatttggcctcatgtcttgcctttctgctgtctccttgcgattgtttcttccaaattggatagagtctatttggagaccagaagacgagcaagaaacagaccagggcctagagccaacgatcctaaatgctgccagcccgtacaagcgaactgaacacgcggtatatgggctggaacatgaaaagtctgcatctagccccgaaaggtctctaccagtatgtctccaaaagcaaatagagactagaagagctctacgcatcggtccatctggaaatcgtcctagtgagttttctcgtgacgcgcagggcccttgatattgccttctcactcttcatccctcagaaaacagattcccaaacacctctatgcaatcagattgcaactcggacagagaaattattgagctccctcacattcctccgaacattagacttgtcaaaggcagaattattgacgtggtaacggggaacagtggttttccgaaagtccaatcacatatttgataaaaggctatccttgaagatggtgccaaatgtaagtcaaatgaccaagcctccacaagattcactctcgttttacttcattctcacgctggttgacttttgatgtttgatggcttctaggcatttacatattggccgaactgaaggaatttcggatggtttgcggcaaagttctccaggccaaaaaggttttatctgattcaagtttcatagtgctctctcgagttgccgctttccagctaagagtaaaattccccagtcgggtaaacttatgaaaacaagtggtataatccttggagcttatgtttgggaatatggagagcctggaagatacagatattgaaagccaagaaatagttcaatatcgacagaaatatctttagataacatcgaggttgggatacaattgcgtggctaaaaaaagcgtccaggaagcaccaaaaacgtatagcaatgtacaagatgaaatagctgacaaatcggtaatttttgcacataaatttctgctagctactctctggctttgctaattttatggatcccaatcccagtgagtaatatgaaggagtaaaaagcaatgaaatgcgaatgtgtcggattgattggttgtaacactgcgaaaattcatacagtgcgtctgaggtttcacacctagcctagagaaataggctcttcgtagagtaaagttcaactttttgcatgtcctttatcataaaagcaatccaacagtggccctatggttagtttgctatataaaaagctctcatcgctaccaaatgctttcaatcacatctaaagacccaaaatcaactttcattatttccctacctaaagatgaatccttcatcttcagccatttgctcgcccttcgctctccaaaacataatcaaagttcggtatagtgttatacagatgattttaatactaaactatcttttcattgcatcttcaaccctcgaggatgaagctgagcttcggcgcgtcatcacaaggggagaaaagcaatgggaggctggctttgtgcctgggagctttaatcatatgcaagtgaagggttggtggatgaaagctcgaaaccttctcacagaagcgggatgccttcgtgcgttctcagtggaggatttgaaagcccacctcggatatatgctcttcatccttggcgaagtttcacttcaatcgtcttgctccgggttcatgctatggcggcggcaaaatccttctaaaagaccgtttgggagtagagcaagtatagctctcatttgctacagcttttcgggaataaccaatatcagtgactatcaatcggtcgatccatggttatttgacatgggctttgttaatgatatgctccgccgtcttcaaaagtcacccttattcgatgacaacattcggttagacgaactcaaaattgtgctcacaaaccttgaagcgattttgtctatggaagatgagcggtcagctttgattcaacctcatcccatcgacatcaacgatactattcaaatacaagcttattttgcgacagcatttcgtgcacttgaaccaagcatactattgcaaattttgccgaaatggagaaaagtttggattcgatccagaaaaaacagcaaagacgatttgccccgcctggtcatggaaccaatgacttacggtaggaagcaggacgtctttcattttcctgatgccgctttctgacattgacagatatgagagtgcaacatattgccaacatctttcaagaagtctcatccctgaatgcattagggcaagagacaaagcaggtgaagctgttagaaagatccaagcccgatagaatgatacttggtgagatatttcaaatcagaagcatccagcaaagatgcgagaatatgcacctaggttggccgacctgtaccgacgtaacatgacatgaactaacatggtgcagccgaaccagtggtagtccatattgtccaggtctcgccgaatccgtaaggtgttcgagccaacgcgctttaagacggcgggcatttgacaggaagagaagggatatctcgagtgaggctcagtctactattgagtccccatttacccatagtacaattgagaataaaggacctttgggtcatccgtttgactcttttcatcgaaataggggacgcagagacaaaaggctttgccctctcaaacttattgattggctccaagtaattcattactttactatccatgcttcataaatccccttttggcgctaaccgccgactgatgtaaaacctgggcatggacatgtaaattccaattccgagaagacaacgcaatgtcatcgccttcatcttcgggttgatcatctggcccctgtccattgactttgccgaattaattccagctgactaattcaccgcagctgagattcagagctacctcttaggtttcaagggtgaagctgaagtggctgttgaaaaggctgccgagtgggtaaatgagacaatgagggtagaactgtgcagtagtgaaatttgagagagctgcggttggccatcggttcgaacgaggggggtcatgccttgacaacagtgcgccagagctcggctgacggactggtccgatcagctttctgccagcaggtcccgtctccagaaattctgaagcctcacatttccggcagatttagtaacccaaagcggttagcgcttatctttatactagtcagagtagcgcctttccgaatcagtttttagtaatactgcagagttcctactattattcctataatactaacttatatgccactttttaaggactatagtcttcttattagaaactacgatagtataggattagtgcttaaagctctaagagataggtatcctcgtatactctattaaagaggctcgtttacactactttatatatataatatatatcggatacctcgactttctacttatataaattatatttaaatatcctctattataattatatcttcaatttaatatataagtaagttaaatagattatcccttaagtttaaactaagggtagtatcttaagcttagaaagctatatagctttaggatataatataaataggagatttaggtaatttaataagaaataaagatttttataaagatctgtatttaattagaataatataatatataatatagcttaggttactagcttctagtcctttagtagataaaagtatacctagagatataaaaagttgaggtattttatagatatattagagttatcttctttaaatataagctatattactatcttaagtttagagagaggtagtttttattaaattagaatagtagtaaagtagaaagctaagaggaagcgatagcttaaagagtataagaaagcagagagaccgatatactaaagaaacctatataatatactattactaaagtaatactatagtaagaagagtatataaataaattactaatagtaagataatatattatattataagatatatactatttattccctttctttctatcttattctattagctatagtctaaacctatatttcctaatatagattagtagttcctatataactaaaaatagcggtagcctaatatctctcccttccctaatatctcctagttagagcttatacctactatataactagctatagaggaaaccttttagtctttaatagtagagaaaatctagaagctactagtaatatatagaattagtaactatagtaataagtctattaggtaatatatacttagtatttctaactttagtaagcccctaaactactattagaataactttctactaatatatataatctactaaataagatagtaggtaggaataatagatttactacctcttcctcctattcctataactagtctagcttctaaaataaagtatagctcttatcagttcctccctatacctaaaaaacgaagtagagtagaatatatagggctagatatactatcttataaaaagaaaaggaagaataaagttaagataaaagataagactactcttaaagtaatagtataagggataaataatactatactacctttaggaggtatactaactaattccctattaactaataaagtgaatatagtaataaacttacccttagttatagtacctttaactaacttatataactactaaggtagaaaagtactataaagtattattaaaaatatacttattaactatattaaacttaataatctacttagaagatatagatactatttaaagtaggtaattataataataaaggttaaagcgatttaaagttttataaataatattattaagttataataccctaatatagtctagttaattaagtaggagaatatattcttagtaagtaatagtatctagtcttaatttaataagactatatattaggaaattattaaaaaaggtactaagctccttaatctaaaggatttactaatatctaaaggcccttttaataaatttataatagttaagaaggttactactaagcgctttatataggaagtaggttatagacttagccttactaattaatagtagtactattttttttagaaataactattcgagatatagaatataggtattaataaaattctcttatattatataaaggaatttaactacttctataaaagctacttattagaatctagggcttctttagtagagatagtctagaactaggaagaaagatataccttctatattaaatagttagaagagtatataactaaggaaagtaagggtaattttataggaagactatagctaaactagctacttataatagatagacttagtattcctaaaaatatatagaatagtactattaacctatagttctctagtatagaggaaactatattctaattaagtagattatataagctattagctattatatttagtagattctttaatttatagttaaaggtagaaataatatagaataagtctatttttattactctttaacctaaaggtaatatctttcttatagtttacccctttattttagtctaaaaaggagatacccttaggttatttattagagtaatttagtactttttagaatatagtattatctatagtatacctagtcctaaagaaaacctttagctagactactctatagtaactagggtactaaaccttataaaggtattagttcctagaggtaactttaatatttatctttagtaagagcttattaatagatagagtaaaggatatcttatataaaaggtctcggttattactctttaggtaatttaactatttaaagaaattatttatactattctttaaaaagtataatatttcctatactaatcgctaacttatataaagtgtagttatataaaaagccgaagttcctaattcttattttttatttatatctagtatctagtttaatatattctaaaatactatttactagtattatctattattatagagtaaaggtatatatatttagcggctattatagttatactagttagtataaaaggtatctaaaatttagactactaaggatactttatattagcttagatataagacttttatatatcctaaggctaagttatactaataagttaatagatagtagggataaggaggggtatattttataagagggatagatatatattatcctagtcgatattatatagcctatctagtagtctaaataggttccgcctattaggtaagtaaatctttatatctattaagaactatctcttaaatagactagttattagatataagtactttagaactattactatagataactataataattattatccttacttttagagaatatactataaaataagtaggaaaagagaaggagaaagagattagggatatataaactaagggttataaaatgatttaactagggccctactaagttagattagatataaagaataacagctattataatatattaataaagtatatactatagttatactttaatagagtagctataacttagtagattaaatatttacttttttttttatacttataagactattctaaactatagctaactaggctaagtatagatttatattttagtctactttagaagttaacttttattataagggattagggtaactaaaatatataccttatacttctaataaagtataagagactatatactataagtatagtttaaatatataattaattaggttctttatagatactataaaaaaactatctctaataatatagcttaattcctatattataccagcctttttatagttagtattacctaaaataaacttagtttataataaagtctattagagtaagttatattagatataagtccttactattctaataataatatatttatagattatttatatttaaataagaaactctaagtagaatatatagaaatactaactacttttagcttattatatcctatattagtccctcttatttatagttaataataaagttagactattatagcttttcgctataaaattacttaaagaaagattttagaaacctctattactctatatccttaaataaactagtaagtaactaaagtaattatttatagacttaaaaataagtggtactataaaaggtaatttaggaaattagttaagctaaagtctagttaatataatataatcggcttctcttatactattatttagagtactattagtctaaattaggttactagaataataaagatatttttagggacctataataaacttatatattactttataagggttaatataaataaatactactactactactataataaacttaatagttaatatagtaatagctattaaataaatattatataattagaataaaataagtataagtaagatatataagtaaaaaatccctaatctctatttattacttactttataattactaataatagtaggataaaactctatagataagtataaggattacttttctaactaaattataaaggctatagctatcttttatctaaaaaagaggtactatttagttgcttattattataagtaataaacttctacctagagtaggtcgataacctctagggaataattaaactagttaatatttaactagctttatactctactattatataaagcttctataaactttataactaggttatctaagttaataggttataattactatcttttattagtaagatatatagaaatatagttagaatatttatatcttaagtaacctagttttagtaatttaggactatattatctcttaagaaaggaaaaggcttctaattattatctttaagattaattagattaaactctatcttatatctctactaagtatattagattaaaagctaaaagttagctactttttatataatcctctctatatttatatagattaaattatactaagtttctaagagtattttctatagatataataatatattatagactattatctaaacccttatttagagaagactctctttagtattaagactaagtaagagaagaatatatcggtaaaaactttccttcttagtattattcttagtaaggtaactaaggattctatagattttagaatctttaggtaaaatataattaggctaaaagatatttttataaatttcctttaaaagaatagctaaggttatagctaggtatatccctttagctttagggaagtttaagggtattatagggatatattactaagaaaacctagtattctctttttaaagcctttcttagataaatatatcttttaggataaataaataagtagataagttatagaaagggctagatatatatatacctttaagatcttttctataagatcctcctttaagatagtagttatcttatttagagtaaaaatctaaagatctaaaaagtttattaaactaggtaaaatatattagtatataaatatcgctaaatacctatatataacttatatcgagcttttattaagctctaattatagaatagtaaagctttcgatattttagagttagccttagcttatttataattctttatttagtatagctttcttagcttttaactcttctattttctactatattaataaaagcattattttaagacttaatctaatagtttttattttattaataatcttatctttctcttttaaattctattaaagtatactaatatctttagctaattaagaaactttactaagctctaataagtaggataacttaagattatctatctactactagagctcttatacttacttagagtatttagtaaaagattagtccttctatttaactaatatataaagtaaattaacttaactaagagcttctttttactttaccttttccctcttattagctataaatatctccttaatagtaacttactttctttcctttagattaaagatcttattttaggctttccttaactccttatttctagtaaaaacctatttatactaatagctaaattctttaattataactaatatagcttaggacttagggcttaaagctagtatattaatttacttaagaaagctctaaaggctatcgctattaaaggttaaaggtataatatactagcttatacttaaatagctttaaatactagaagaagatataataaaaagactttattaggctataagtatttataggtttactaatatataaaacgaatttttagtctaataagagggtcttctatatttataagtttctaaaagagctataaagagatactatatagctattttatagatatttagattatatctagagattgtaattaagtactatatataaataggtactttctaaatatataaagggaggtttataagccctattattataagtataatagaagtaatactagtttatatatataaaagtagggctagaatataatatattcttaaccctataggcttaatatatataagtaattatatatatatttcttatacctatatatagctatatatagcctagaatatagttaccttattagagtaagtctaattctactataagttaagatagttagaatatagagtaaagattatagtattagtataacttaggaaaaataagtttaagttctctattcttacctaaaatcttagaatagagcagaggtactagtaagtaggttaaaataatttttagttagtaagctagggatataaatagattataaaatatatagacctatactttagatagggaaggggcccttagtttactactatactttaactactactttatataccctcttaactagtaggtaaacttacagctagttattaaattataagttacttagaaatgtaagatagaaagaaaattcttagggaaaaaaaaatcaattcgtttatatcctatttaaattatataatacttaacctagacttagatcctaagtagataactatatataaattcttaggctaataaatatagttaaaagaaacctaaacggctatataaataatatgatttagatagcttacttaatcgaataagaataaggtctatagtggtaagaactaagggttaacagtaagtaaacttatagctgttaattaaataatcggttatcttaggaaaaatgcattccttttaaataaccgaaagtatttattaaatatcattaggtagatagcagtctctactctaaatcagtatatttcccctaatacctaggcaacccctaaggtctagagcaaaaaattaatttcactcaggttagagatatcctatataagtctagtaataagcctatttctactatattttctaggctttatataccttatcgatttatagtagttagtccttaaacctttacgaacacttcttatttatttatatacaggcttttctatactatacctctagaagctactttaactatactatacttaaattatatatactttaagctaactatataggctatctacttttccctattaggcctacgagtagttataaataacttatatataagaatatactgtaaactcttaagtatagagattctatagtactttagaactataagttattatactttatataccctcggggccttagtaatttctaatttatagcctaaaaatattatatataagatattaattacaaatattctggtctagtataagttgccctttagttatataactttatatatattattctagtatatctttatcgagctcctctagaccctagtctattactaatatagggaatagatagtaggaattcttaaaaggttagttatctttttattaaaggtatagttagaaatatactagttataagctaaggaatacctaaaatcccgaagtatctactaataagataaatacttagccggtttcttaaaggtatattcctatatagatatctatattatatatcttactatatttatacacttttttttattaagcttaatttataataaccttgtttttagtatatagactttttaatagattaagatcgattagaataggtaggtagtatagaagctatactaagagattccttaaagtactgctattagaaataactaaggagattagggaactaaatatatagattaagtagtttttagagattctagaaatctttaaatagctatagttttaaagaattaaaaactagtattactctctagaaaccgtggtttttagaattatagcctatatagacctaaaactatccttagtaagtttattaatatagctatatcgatatctactatactaaaaactggttaatttctctaaagtttaaggagctagttaataatattatagtaatatattaagctaaggcctagttatactagaaattcagtttagagctaaccgatatatatataaatattagaagaattagttaactataggtataaataagataactattatcttcttattactaaagaaaaataaatccttattttattatatgattttataactagtatctcttaaatttaggaaagatttaataaaacttctatacttagatttctaagctaatttatttacccttaatattttactagtatattcttactactcctagctattctttagtattttattaattattattttactattattaaaaatatataaaccctaccttccgatttattacctattaatattataactctataaacatttttttttctagtatatatattttatatataatcttaactcgtttagggagtaccagtatattcctaagaacactagtctatccctaggaatactaactctacctttaagaatactaactctatttctaggatcactaggacgtccctaggatcactagtatatccctaggaacactagtctatccctaagaatactaagtctacctttaggagtactaactctatctctaggaatataagtccatcccttagatcactactatatccctaggattacctctctattcctaagggaagttttatagataaataatcaatattaagagatataatagtcgactctagataaataatattatataaggaagtaaaaggaatatagcttccttatatttatagggaacctagttatatagtcccgcgtagattatatttctatctatcttatatatactatataatctagagagtatatactataatatatattatataggtaatctagtaataagtatataatatatatatatacccctatagtctatataggtactatttttttacctatactacctcagggtttatataagcgactagttatataactagacttaagagtctatagaatatcttagtaggcctactctctaataagtagatagctaaaaatttgccacagtaataaggtaaagataggtatacagtgatataatatcaggtattagcaatcggctaagaacaatcttataagaatagggtgaaaaattctcgctagtagatatagggggtggtagggtattagggaatatacagatattaaaataagtagagatagataagctaattaaatctaataaatactacctcccttttatactaaggtagtaatcgattaaacaaaatagtttcctcaaataagtaaaaacgttttttcgaggttattgtatataacagttattatatatctaatatacccgatttctatagtaatatttcttaaaagttatccgttttcttactctcctataataagagctcgaatactttaaatcggcctataacgctatcgataataagcagcctcttaattttctatcgctaccgtacttaattgcgtttatatatctttttttagtctaaatctagctagctgtttctttaattaaactacgatatattgagttagggagctatatttatcgctcctaggatcatgctcacagcctctaggagcttaatatcctctaggaactattatgataggtcgtggaagtgagacgctggattgttcctaggctctctaccttagatcctagagctatacccgtccgtttacaggagcgctgattacttcggggagcaattgttttactacccgcacttattacctgcgttttagatcctacttattattttgaagactcacactcctagggttatatccggccctagaatccgtagtatggctcctaggcacgcttttggtcgctcctaggagtcagactcataggtcccagaggacctacaactcctgggagtgaactggacagccttgggaactagagtgtgtcccctgggctatcgatgccagtggatcattggggtcacccgcacgttttacatttggtcctggacccttgggtaagaatcctgggatcacgaagtctccccagaattaaaaaatcattcccagaggtagggtatcagaaatagaggaatataaatctagatactaggaacaaccaggactaggaataatttatgtctttccaggaaattgcaaagaagttgttagagattgagtatatatggtagtataggtatttggttgctaaccaaacgctgtatcttcttagccagctagcgtagtggtataaccaaagcacccacaatccgttacagaaggtggcctatataggaatacctcggagagtagggactcactgtagggactaaggatcgagtggtaaagaagaaggaactcttacggatagtatctcgagtattagaccaggtagaggttgaaatagatcctaagcgatcataagatactccttttagatcctaaattggcctatatggcttatgataaaagcgtactgtagataagatacggatactagaagtggaaaaatgaaagaacatagacaaacgacaagttttaggtagcccattccaagagaaagaatggcttggaaggcagaaaataagagatttctttcgagagggcttagcttataagagaatcttcttaagaggaaatcagtcacagtaaggttagctaaagagcacagacgatatagaaagctatacgttatataaactggctcttcttcctacccctctcctagtccaaacattctaggtcttaactagtcttaagatggtctagagtcgatattatttagctagacgctatttagcgataaataattttactagcttatctagcttactgaaggagtaggttctacagtagcttttattagatattagtatatagggccttattaaagttatattagctgattagctaaggaacctaacctataaatagctataaaggaaagggagtataactacctatatttctaaaatatctacaatacacttagttagggagctatataatatatatcccttattcggctactaataagtgatagttatttaattagctaattattaagataattcataatactagaaagggtttaggtagacagcagctctataattattaattactagatttcagtagttcgaaaatctcttagtaaggtaagaataaaggatataagctagactctacgacccttatataggtagtctactccaggtcggtgattagcttctaataagaggactaattatactattttctattataataaaagtaaaatagatagtaatatatagtattaacgaagtctaggaatagtgaatacctacccttaagtaaatttcaaattatcaggggatataactgctcctcttcttaaaaatctcagatattatatacttagagatttatattctagtaatattaggaagtaatccgacttctagatatagggctaaagagtataaaagactaggtagaaccccttcccttaatatattcttagaaataaaatagtattacagctactatagggcttatttagcaggggcttggggctagatatataggcactccttaatccttttcgactatatccactagatattttatacttctttagtatacttataattagcttagagttattagaattagctctaggttatatttactataggaccgatttataattatatacttcggtagataactctttaagccttctatcttaagtcattaatattactatactagatctaattaaaactaggttttaccttttcctatattcttacttcctttatatatactaataatatatctatagtattactagtattgtagacgctcactagagcatttcgacttatactcttagcaaggtctatatatatatatagttcacttttttagacacaaagtagcacaatttagtaggggaattagctatttaggtattttatttagaggtacagtcggctgaaacagagaaatgtactttggtatactagtatcttttatacccaataactctgaaataaaaaaaataagtattttctagagcttaaatagataaaagagggtagattataccttagtcaacaagcttagataagtctatatttaatatttataaagaaattgcttacccttatacctattagaaaagaagaaggtattactaatagatttaatatccctatagatatactaaataaagtcgctaggcaatatttatatagttcggaggtaaggaagccttattagctagaagtcaaacctaagataagtaattaaaagaataggctaaatccgttaggccgactagattagctattagtaatctaaataagttaggctaaggaactgatataggaatatactaaggtattaatataactataggattctttataatatcgtttcctatatataaatctttattttaggagatctataaacctactacagagtactttaaggcctaataagatctaataatagtatctcctaacctctatagatcactatctaaattagatatatatcgagtgatatagaaccaatgttaaaagaaatctatagaattatatctagtcaggtcctaggcctagagaggagggtctgtatttagaaagctgtggccatacagcctttagtcctaggtcctgtgatctagtataattaactctagacctagtaccgacggctatagatacggatccatattagatatacgtctacagctactagtctaggtaggctttctatctattaactaacggctagtctagcttagtaaccataggggcccttaggcttctaactatagtctatataggttataagtattttaatctagatcttaattgcctccttatattatactaccggctctttattaatctatctattataattactatagagtaccgtttaactaaatctaccgcctctttacttataactagattattactgaatattataaatattatctagcgattttcgaaaataatttatccctcagagatatatactttacttactagcttatatctgagataacgctataccgaatatagctagcctataaactaaggctattaataagtctaataagagataagcttattttaggtataggccaataaagaaagaaagtatatatatctaaagggtaaactattttcaaaaatcgctgtatttatactatccttgatagctatattaaagtgggggcaaggcagattgtttctaagctctcttagatcctaaatcctactctctagtatatccctatagtagaatttaaaaatagattaccccttcgatatatatattttctctcttagtgccctaccctacttatactaaccctaatttgtttaggaaagccctactatctctttataaagtatttttagtagatcactaaggttactataactataggtcctagtactaagtagactaaagttactgaaatatcctatgccgatatatagtaagatagcaaaggttttaacgccctaataaaaggtcctataggcagtatgattcttaccaaataggagctaaattatagcgagcggtatacctattaaatagggcggtaaagattaggattataaaacttttaatatattactatcctagagttaaaaaaaaagatttaattactactctaataacccttacaattttctatactatagctatagaagactaacctagtagtactaatatagtaagtcctctacagctagataactatttagatatagacctcttaggctttaatcctatatatataagattaagtgaaaggctccttatattaatatatctatagtttaagtagaggagggtaatagcatttcaattatataggcttaataatactatagttacgaatctatttagtctctatataaaagagttatattatcgctgcctatatacacgtacttgtaacttttaaccttttatatatttagctactttctaagtcttacttatcgataactttttaagctttaaatactacttatacctatatcctattagtcgatagtctatatccagccgccactattatctatagtactctgtagctgagattttatcgattactatagagttattaagaatactcgccgttacttatattttatataataataagtagcttaaaactaaatttactaaagtggtatattaaatctttggttcttaattaggcttcttactaatctaatagaccttagataagaactatgaaattaaaggctagattataagtaaacctatagaaatattaggaaagctatactatactctgtagatcgttagacctagcgaaaatataagcgtagttattattaattctaactaagggaccggtcttataaagattatttataaggggtaggaatatacaactctctaaactaactcaaacagtaaggataaagcggttatgatttttttatagcctaggttctattatatccttataggtaatacttatataaagtatatagagggaggaaggatttaattgtaagaattaaagatttaagctactactataggtaaaggttttttctaatctacttttttttcttagggctagaacaaaaatcttattctctatatagtttacttagaatcttttaggtttagtttatggtatttatcgaagttagcttcttaataagagtaagtaactaattatatactatatagccgtataggggtttagtaacttagtctacttaatactaggaaccataattacggtaattttaataaactacctaaagtatgtctataaaggatagtaggggactttcctttatctaataaagttaagcgcgatctaaggggcgctaagaaagaaaaccttaagtatataaggggtaatctatttttaaattctactttactataattacagattctagtgtataggtagaaaattgcccttaagccatagactactttaccgcttagtaacctataataattctagctagcgactaagggatataggtggagacccctaggattcaactttatacctagcactttcttctatttaaactacctattaattaaattataagtctatatatagacgtatatactaaataataagtatatctataaattaactataaggtactattagtctatactatgctactgtttccttagttttatctaactttattactaattaagcgataattggtagtaaggataaggctcttggtttttaaatttaatattaatagtaggaagtataataatattattgtactatatccactttaattaagaagttatatcactataataaggaggagctctaagagttactaaggtctatccgaaatacagatagccttattaaggctatatagtaagcgttagatcttaagtactaataaacagctgagcggtactataagtcagagtactagaaaagactgggagataatcgttaaacctatacttaagaaccatatctatcaatttgttaataaagtacagagtaatagtactaagagtaagtatctaatattaattatagggtaggagggtaaaagggaattatcccttagtatagtatacttatctataagtaataattagttagagggattacaaattgagaaataaattatatatctagtaaaaatctgctttcgagtatagcctagggacaattttctaactaaatgccataacctataattacagtaaccttactaatctaccagaaatatattaagagaagctggtagggactttatcctactgaatcaagtttagtgtaagcagggtagggcgccgggagagaaagtatatatatctaaggggtagttatataatctattttcgaattctactatactctctagtaagtccctactctctggtatatccctactctccggtatatccctactctctggtatatccctactctctagtaagtccctactctctagtaagtccctactctccagtaagtccctactctctagtaagtccctactctctagtaagttccttgctaaatgctaaagcccaaaggacccactctagttccctagagctttacagttcgctcctaggagttataggtcccctaggaactattattctaacttctaggagcaaccaaaagtatgcctaggagccatgctatagatcctagagtcggatattatcctaggaacatgggtcttacaataagctaagcagggtctaaaacataggcaaccattatagacagtaaaatatttcctctagaagtaattaacgctcctataaatagataggtattcgcgctagagattagggacttactagagagtactaaaatatactaaaaaactagggtagggcaagataggtataataagggagctttttacttatatctgcacaaatcattatctagctaggcggtttaaagtatagcttttatataaactaagcctttaagggctaatatagttttcacttactctcaaatttattccctattaggtatagtaattataattataccgaagacttacaactttaaggttaattttaaattatttatagtcttaaagctactatagtcttagaactactaaattagtagtttaggaacctcggtagttttaaaaccatatataaataagaattaaaatctatatagtcttaaaactacagtagttctaaaacctttaactgatattaggctaataaattataatatactagcgaattgagtttaggggtaatctaatttgtaattaatatatactaggaagctgtatagaagcttagtatacctactaacgcagctatatataggctataattaactctttacctactgtaaaaacattagctatagcgataataattactttaactatagtatataagaagcagtagcctatatacttataggctgtctaactttagtagagctgtaaaggaagcttaatagggaaataggagatatatttaaagtatatcgagtctactaggatacttaaaataaggagagaaaggtaggctagatattatctcgcaggttaagacagtctaaattgtactagactcggctagagctatatagcttattcgcagccgcgtaccgtaagggcagtcgagtaataggaatagtaattaggctatagtaggtattaataaaactctgagtatattcttaggaaggtgattcttttatagtatcttataagtaagtaatataatatagagtacattttaagctactttacttacctagaattatctattgccccttattattctctatacagcttaagcgaatataattagcccccctattatattatatataatatatacccttctccccgtctaatcttaaccccttagtcctctatcgaattatatattggaattatacctatcctccctttactatcccttctatagagctaaatcctctaaatcctctacccctagtattaaccccccggtataatattactaagaccccgatacacgacttaagctatatatatacctagcctctacctagaagttcggtaaactccgattataagtttagtatattctttaaaagtaatagcggtactatggtaggtagcctaggtagatctattagagatattacagttatttcctctattctctaagaaactcttatattaagaactttctatagaattgtaagcaggttagataataataactagtaaactatatatagtatatataagtagaatatagctttagtaaatataatataaagtcactacttcttttgtcccttccccttatcctttcctctgatttataactctgtgtaactaagctctttcaacctatatataagactagataaatcatttatccctaggaattcccttaccgggtatataataaacgggtctaactaagcttctataagaataggtattatctatcccttatccttaatagagccctagtttataagccggaatttcaggcagtatattcctataaaatagatagatagattattaaagataaagaaagtagtaggctattaaagctttaatttattatagaggttcctagtactagagtaagaataattctctggtttcgagttataggataagggatagataggggcagagttagagttaggatctacgttaatatagaaaggggatataaatattttactagataggaggggtataaaaaatatatcatttgcacgagtaacactatcgcttcctatatttcgttctagttactagtattcttcgaattctggatcttataacccactagaggaatctaatactagaagtagtaagtagctaactgtaaattataggtcttttagaatatcacagttattcgataacttgaaattaaaatctaaaaggagaatttatactatcggagggaggttaataggttaatagccttaaatacctatactataggcttatacggcagtaggctactattaaatgtaaagatagtattctttctattaagattctcttctaagtaatagagtagataaaccggaatcttaatagagaagattctagaagctatataggatactgtgatttagattttgtagtcttattttctactaggtactagtgagtactatatgatttaataaggtacttagccctttcttaaaataaattaggctaggtattactgtagagctactactataacttatatatattagaattaaagtaaagtatcttagggtttaagtaaacgctaactagttatttagtagcctagtataaggagagctattagcaattaataatactacttaaagactactaaccgaataaagtaagatatttagtctagaagaaataaaaaagagtagactttacttaaaacttaggttatctatttatatagtctaaccgatatcttcgcggttatagcttaatattggactaggtattacttacctaaggtactcttataaactacagatagttagagtatagcgatacatttataaaggtaatactagagttataggttagctagtaatagaatagttattagataaaggtatataccttagattaataagcctttcttaaaaattccttattaatctaggattacctagccctaaaagtataggaattttatagcctataccggaagattgattttaaggcttatactaaaggtatagataagctattataggtattagaataagatattgtaagcataatactaggttagtattcgggtttttagatacagtaggcctatattactataggtaagttcttgatatttattctaggtaaaacgggctagtacctatatacaaattttgtacttaaatatatcactactaaaattaaaagggattaagcttaggtattagtaagtatataacttaggatatagctaactatatagagatagaagatattagctatagataaatacagcctatctagctctgtaggaaactaacttctaggtataggcgatagcagctatttatagaaagctttttttatctagatagtataagtagagacgttattttttctcccatctatatgataaaatcaatatataccggattttcttcttcccgacctctataggcagcctaattaatatagagactagggacaagtagggcagtgaactaaggaaagggccagagggataggccgagtaaagattatctatctaagagttagttaggcctatatgatttatatatacttcctaaaatcgtagttatcatatatactctttagttatttctcgaattttaaagtcgatataaactgatagcttatagataaggcgatctaaagactatctataatattaaaatttcagtaaaaagtgtatattatttagtaagcttttatattttttttcccccctagtattatcgagtatagtattaaggtatcaagtatattaaggttacaagtatatctaccttaaagtaagacttacaaagttttagtatccccctagacctaccactttaatacctactacttatagctataccgctatagacctataacctatagcgcgtcgcttatatcttatatttttacctatctaaaccccttaacccttatttttattttataggttactctttatttatttctagaatcctagtactaataaagataagaatattaatagtatatttctaaaatataaaacttcctatatcgcttattataaaatactaaactttagtagatatataacttatatccgatattatatatactatccttaatctttccacttttagcttttatcagagatatagtgaatctatataaggttttctagatatttacctagaatatcttataatattaatatcagacagcttatatcagagagtatattactttctattactatatctaacaaaattattaattttatagtttaagttatagatttcaatattactatctagaaggaacctatataagactagtcactgatttctatcagtttttaccataattaggttagtatccgacttatcatatttcgctatagataattaccccttatttctcttactattcaccttaatatcactagtatctaacacttaaatagaaataaaaagttatactttaagtatttcctattaatcgatttatttatatagttatgatctctagatacagtatttctctatctagacttatacaaccctcagatcaagtctatcgtaggaaatataacaaatttagtatatacctagatattcctataataagactaattattagattaggtctattgtaggaaacactataattttagtatacctagatattcctataataagactaatcgttagattaggtctatcgtaggaagtatcccgattttaatatatacctagatattcctacgaatagactaattattagattaggcctattgtaggaaataccacaattttagtcatctatagtctagatattaatatctaggccttttaagagaagaactctttaagggatttcgtgatctattataggaagtaaagtatcggacaattcctaactaaaggagctagtcggctagctctagctagtttatcctaggttacttaaagatcctacttaaggtttatcgatactaccacccttccttcccttttatcttaggtctagcgccaactaatctaatctagtatatattcagaatacacctaatactcgttagtataataattttgcggtctttttattcttaatctattaatttatactctcccaaaatccaggctatcttaataacttcttagtaaatatagtaaaagaagaatataccccttagtctccggtatatattagagatacagccggtttaataattaaaagagaaaggactatagataacctcttatattatacttttactaagaggggtagaacttattattttctaccctaaacgctagaaataggtaagggagagctttatagaatagcctaagttattattactacctaccttaactcgacctaattactttactattattctataatatttttctttaaatatcattagaatctaaggtactatttgtagccttttaaagtagaaaaacgatagttagggattaagattattacttagctagtttataagataatacaatagatatattctaagtaataagagataatagaagtaggaagattctcaaacgttactagtatattaaaacaacgatttacagctctcttataaagtaaaggctattatagagctatatagtactatcctccttaaaattagtttttataggagaattcgacagcttcttaagttataaattacctaccgagataatggttttcttataaagtagggaaaaggtagaatataaaggcgtttatatactctagacaaattcaaaatatacctataccaatcgatatcgcagttataataatcttaatatagataatcagaaagtctaataaatttctagaggtaactaatctagtattatagagaagttaaagtatagcggaactttccttttaagggaagggtaaagaggtaaaaaagggaagaaagggaagaaagcggagactacctatagaagtaataattagttactaagttaacggatatactactatttaattatatatagaaactgtaccggtatattactactaacctatcttaggtgattcgctaccgttcttttcctaaaataactcccttttattataaatatactaatactatctatctattctatttattttcgaactaccgtaaaccagtattatctagccttagcttcttttactatctactcttactattccttagtattatctcattcttgtagtataagctatagtaaatcattagatacctatcctaagacttatagtaagttagatcctaaagtgattcgtcttatagaaataagatctttaagtgttaatataatagcttatatactcctatcgctagttataatatcctcgaaatagttagttcgatttttactcgtttctttagatatttaattaaagaattttaaagattctttgatattattggcctcttcttagctattattttatttacctgttttattgtcctatagtagcgattctcggtaatataataattagggctatcctccttacttatagcgatattgcagtagccttagcctagaattaataagctctctctctatagaagttaaggcttataagaggattaactaaggtatattattataccctataggtaataatcctactttagaaatagttataacttaagttatcttttctagtaaagtagaccttatctactctatataagtagaaagttaatcatagatttcgaggccttactacgtgctttctctttcttcttctattatctgaatattaatagattcctctctagaggataataatactaatcttttcttaatagactatagataaatactaagattatatttagtgtcttcgataagttcgttatatttatcgataatattcttcgttattttagttaaattcctagaagagttaataagtactaagtaagaaagtaccccctcccccagcccttaatataagaaataagaagacgtatatatttatataggtaagggtaatattaattgtggatttatagcctaaaatcatagtctaaaagctaataatatcttcacctatatactacaattttgcctaatcacagatactaaatttattattagtcgaatactcggaataacttatgattaatatattaaaatcattatatactttataatatcgacctaagggtttttcaataattctactattaaggaagggagctatactaattaattcttagaggatatttagtactttattaaggtcctatagtatatctcggagatcctaaatagacttttctcgattataaaggctttaaataatactgaatagtattatacttaactagagtaccaaggaaactagtctaataaggcctaaagtaatactaataacctcagctatattatataagataaaagggagcgggggttaggttttaagagcaatagttaggtaatactaagtataggctatagatataaatagaaagagcgaggatataagtagtagttttaactgcctagttctagtaaaggtctaactgccctaaaatagctctttttagtataaattaagaaggtatatattaatagctagttattagacctactaacttatagattactctgttcctaccctataactaaaatagaaaatagatctctctagtaatagcctcttaataagttattaagaccttagtttattaactgctacctaaagtcgaatctttgccttaaatattctataaaccataagtaataggaaccaatattttgatatatctatagaggaactgcttactcctataataaggcgagaaaataaatatcgcaatatctttaaggatattgttatagagaagtatatattccaatttattagatctataaaggggtatataatgaccataagatcagttatagctaaggtatatactacccagtatctaggagatacgtctaaatctataatctagtaaattttaagggaccgtagtagaatcatagtaaagaaacaacctccttactactaataacagataaaaccttttaataggcccagtcatacagttatatagtaggtaagaaataataggtatactacctcaagattctatatctttactatagatattttgatcagaataatcttatagattaaaacgatataagggagggagggaggaagtaggtataaagaatagaggtagttattaggagagggctgacagaagagaagcggggtaaaagataatagatttataaagaatatataagaaaacatatctaagggctttattttagatagggctaaaagctctgctcctattactctagggttaaaagcccccgaaatttatcgaacggtattagtataatatctatagtaccgccgctctttatcacacttcttcttatagagcttatatatagtttatatagaaagaggttaatacctaagtagaggctatagcggagattctaaaatatatctaaaaacactcgaaattcctaactagattcgaaaagtacagctcctataggattaaggactcccgtaggactagacagatacagcttaccataaacgagccgcttttactattaatattatttagctatataacttaagaaatacgcgaaattttaaaagctcttattcagactattctaggggtcaaaactttagggttaatattagcctaaagttactatctgatttcggtttaaaggatagagatggatttgccttatcctatcctctattctttaataatacctgtggcgccgaagtcctactaatatatttttaagggatcggtttttagtttaacgaattactataaagggactatatataaagaagatctaagctaatatattaaaagctataatctctggtatcttaatttcttctaatatttactatactatatataacttatttattctaatacttaaaacgaatttataataccgctaatttaggtactaactagtttttactcttaaaaagcgaaagacaatatctaggttaaggtatagagtatcactatcgtttactcttaggtaggggtatagacgaaatattaggtacagaccgctttatcgttagcttaaagccttagctataacgatctttaaattctaataaaggctgctcttataagccttcgtcttatatagaataccctactgaaggtaagcctctataatcggtatttataaaattaaccctagttatatcccttaataactgttaaagcgatatattacttagatagcccctaacttacctagtcctctatcctagcctacaatttctactataaattattttcttattagtagagactataaattaaatagtattactaatagtataattatcgattatactagcattttcgtctaaatgaattctagcctttaaatagatatatatatactagtaagttatctcccacttttcttataacctaagaagttctgcaatatcctcctaagagactgtctttatctttatctttatcacaatttagtctattactatcttaagataattctctagcttcacagcggtattaataaggctatttttatattcctataaactatcgttagtaactctttcgggaatattacttaaactaccagagttagtagagttatcacaagatttctatattttttaaatctaattaatatagcttgataactatatatatatttcgagatatttttaggtacttaggcattcctcctctattagctaaatttctctagtatctatgattaagttatatatatttttagcgataatattcttaagctttttattaatactctctaaataagttttaagattattagttataatttcaattatttccttatagcttttaaggctatcagctataatagagaactatcggctagaaaggtatattagtataagtttaaatataactaatatatataaagtgatttatagatttatattattaagggtaataataatagttgatttataactagctaatatctatctaaaaccattaatatcttcgcctatatactttaatttagcctagtctcgaaagcttattttactagtaagagattgtatcgaatattttttaagttccttttcaaaatctctgcaggtatttctataataaaggaggggatattcgaggctaataaagtttatatcggtatttatattcaaggtttctgttagagcgctaagaactctatttagagtcttaagctcctctgttagattgtagatacgttttagataagattagtagctttaaaccatatcgaagagggcagtgctagattaaaatataaatatagctaaagctactaggccagatgctatactaataggttctactattaagtatcgcttaataataagtaggtagtgtagtactaggatagttagaaattatatacttaagatagaaaattacgggggttaagccttaactttatatttttaagtaaataataggagtgatccttatctaatcaggtctagatcataagcgcctatctcttatataataggacgaggtaaaaggcttgataccgtcgtctagctaggaggggtattatagtaggtctagaagctagctagctaataaataacgtctaggcctacttaacaaacattttgtagcactgaatttattcctcctaataataccctgaatctagaatcagcctataataatatatataattatagtattgacctcttttcaaatataattaatatagaagaaaatctaggctatagaggattgttaagaatactaggagctatataccttattcttatctccttacggcctacaattaagactatttgccgctagcagtttaaagaagagggctctgttaggataaattcctttaggcctggttgaccaaacaatttgtgcttttagctatctagtataatagtataacctaaatttctagttagcggaatatataataactacctaagaccattttagctcttaagtactagttattagcctatagaaattgctaaagattgtgataaatatatatattaaagacgaaaaaaatcgaatatcctagacctaagtactaatactcctttcttattattagtaagataaattattttctaagctaaaggtaattgcataccttagtctatattaatatctaatcctgattcttcttttatatagtaattgcgattagtaataagatagtaaatatcctctgtgtacttataaagatatattttgtatagaatatcctcgctatatatataacatttccgatcctttaagtacttttcctaaaagtattataaagtcgatttatacttactatatttttgcgttcgataataaataggaagctaggtatcgctataatattgaaaatattgccaaggttttttagccttctaaatatacttccctgccttttctagaagtaactcttcttataatattttaggaaagatagaagttgtctttattattctcccttctattatcgtttactctttattaggtttattagttagagctaaccgtttatattgtctatatagcggcctacctttaaggtaataatagtattataagattataacaactgctgtattttatctttaccacttagcttctaaggaataggaggtcggctaggttaacagcttctcgagaagattaatctactctagtaatatactatctatttatagggcgtccttcgcttccttattattaatagccgctctagagagctatcgcttaatatctatattcgcttatttatagttaaactccttttgaattttctatcttaataccctctctagctagccgaaggtattaagctttttatatacgagtttattatattacgattgtatctccttacttgggttatagatataaacgttagcctacttatctaatcggtagactgctttaagatactctagatattcccggatcgacgcctattactcggttattaggtactaaggccgccttatatcgatctacctacttatataggtaattatatgtataagagatatattagatttataaccgtttattatactttatatatctatattaatatattgaggaaggtaatattttaagaaggtataggaatctatatactttataattagattctactaggctttactaaccgtatcactattatttaatatctttctatctctatagtatatataatatataaatattgaataaagctaactgtaaatctctctaagattcctcggtcgaggactattatcatttttagagagttagagaattgattgagatttttctgtcatatatacattcgccttaccaccgtttttccgttatatcctactatttgtactatataaaaaagcctctcttttatttgtcatctaaccggcagaaaaagattgactatgcctaacgggcatatcccgacggtccctagagaatgaatcatcattttcttccccagagcttcaatagtcataatttacgtagcattagaagattagttattctgctctacaactgcggccgcccataacccccgtactattcgatctataaagaactagcatataacacaaagtagttttggtaggggtgcgtaaatagtatttctcttgatgtattataacatattaggtaccggcactgatcatattcgtcatcatattccaatgttcatgcctctcattgcccagaaagtctatccggtattatggccaaaagcgacctgaaacctaaccaattatcgcctcagactaagcagggtgagcgacgaaaacaagttctcattcgcagtcatggtgcgggtgccgggggagggacttctggctttttttccactttaggaccccctttgccccctcggcgattggtgccacctaacatccacatcgcgaaactcccggggacatctggtcctctggccttggcttttttaggagctagagaaaaggtaagcgcgtgtctttgggagtgcttgagagtgacattcttaccatctgctttcttcttcggctccgcaggcggatcaggaggttttacaggggccggttccggtgcagggggaggagggtcttcctttggcttttcgggaattggccacatgtgcatagtgatagcccagtcaggctcgaccacagtttcccaaacctgtgggaggataatgtcgccattcgggccaataaggtcataatgaccctcggcgacatgaggtccaatgacttcaatatggaggaaagcctgccggatgagttcttccatcccctataactaaaattaggacgagagaactatatgaccggagtgaggggttgacatacctgccaggtagcacatagttcaaatggaaaactgaattttctcccaacagcatccttgaatttgataggctgcttcttctctgggggtggtggtggcggcggtggtgggggcggttcggcagccttagcagctgcctcagcagcttctgcggccgctttggcagctgcttcattagctgcggccgttgctgctgctgctgcctcggcagcggccgcggcggtggctttctctgctgcctccttggccttcgcggcatcctccgccgcctttttttcggcatccgctcgtgcaagcgccgcagcttcctgggtaatcttccgatcatgcgcagtctgcgcatcctgggctgctttctcggcggccgcgcgttcaatagcctgctgtttggcaagctctttcgcttcacgatctagacggtcgtccaaaatcaacttctctagcctcgcaatttgctcatccttggcagtgtcaaccggtggaggcggtggtggagggggagcaggttcaggggctggagccggagccggagccggagccggggctggggctggagccggagcaggttcgggagcaggcgttgcagggggcggagatttaggtttgggttgcactggaggagaaggcactgggggatagggtggccaataatgagaaggcatcatgcccgggatcggtcctccgaaatagctgggttgatctcgatagaaaccagtctgaccgtaggccattaactcgtggggatatccagggtaaggggaatggataccgtggggacccatcgcgtgcggcattggcggcattggcggcattggattgtgcaattgaggcggctggcgaggcgcatgtcgtggatgaagttgcggttgatcgggaagaaaatgaggcccaggttgaaagtggggtgggtatccgtaaggcggaggagcaccataggggttaggttggcccgggtgaggaattctcatgagttccgatgtgatcggaggaggattgtggtgggcatacgggccatggcccgggggtgggggaggagggtagggagtataagatggaccagaggactggctaggggcatatccaggggcgggtggcataggttgctgccaccccctccgatcatttcgaccaaaattgagagggtactcatcggcggaatcggcactatcgggagaatctggtgattgttgtcttcggcctcgaggggcgaacgactggtgttcctgaaccatacgtcgcgatgttgggcgacggcccgaagcggagcgtgaaccgtggggcggacgactgcggtgcgaagttcttggtcgggaggctgaatcagatggtttcaattcatccggatatggcaaatgcgcccactcatcataatcctggtactcatgactttctaactcggaagatgtagggacatggacaccagacgagccctcgtcgtcggaataagagcgatccgagccgtggggatctggatcaatcgagatactgagcctgtagagaaaagagttaagggtgagaaagtgagtttcttaaagaagggggagggggatataggaaaacaaaacccaaacatacgtcatagagacaatgagaagcctttcagaggtttaaaaaatgtatatatcaaggacaaggacttgtcctcccactttctcgcatgcgcgaagtgaggagggaatacccaagtagggtttgaccagacgtgtaaagttgagggagaaaggaagaaaaaaaatgtcaggtgaaaatgatcgcgggggatttgcgcatggacgaattatctctctttgctttttctgtcttttgtcccttttttctcttcttttgatcggatctctttgaatagagtagaatagaaagaacagaagaaatataaaacaaaaacaaacaccctttttaaacgggatagggggtataagaaggacagcgtaggagtatatggagtacaaagtatgtaggacaacaagttcaggggtacagatatctatcaaagaaaagaaacagaacagaacgaagaagcccttttttagttctcgaatctgatatttcatcaagcccattgggcattttcttttgtgtgtttcttaaaccatctttttctcgtttcaatctgctgcccaaacggaaatgcccaatatctctatactccgatccactccccgtacaatgccccataccttactccatacatatgtacaacaatcgaacactctagatttcaacagatctgttttattagggtatgctcgaatcagaaggcttagttttgagccgcctgaataattacttcactggcgattcagtagttctttggctgcaatcagctcgcttcgactcgatgcccaatattggtcatcgatcgaccgtgactcaacaatctcgcctaactttaggagcgcaaaggccttcaatcgttctagggtcttcttgggaaattgacctgatacgccagcgtaatcattgtcaagcatccgagttgaggcctacgggggaaacccgggttagaatggaatgagccaataccattatttgccgacttaccaaagttaacccatagaatcctcgcaggtagtcgtcacaaagctcaatgcttcgactgaaatgttgcaccgacctcccaaggagccgggatgcgtccccatcggaggcgcatatgtatagcagttcaccgaggcgggaatggatcttacattttaatgttagcgaccatttgatttgaaaaagaaaagaaaagaaaagaaaaagaaaaaaaggtgcctgcatgcatacattccaagagttaggagcaatgagtaaagcctcttcgaggctaaaaatggcttgggaagccaacccttgtgactgatacaagtcggccagttcacaccaggcttcagcatcagtagggatggcatcgaggagctgaataagaccggagattgcatcagatggtcggttgagcgagcgtaataacgccacccgccgcttcaggatgggctgtgtgtatggttagtcttgcatagcccatgactaccccaggacctgtaaccaatactgaccacattcaccggactctgtgacagggtattgtcgtattcctgcaggcatttctctagcgctgactgatccttggcggttgcctcctcgtacagacctcgaagccccatgatcctttcattagatggtccaaaccggagactgaggcgattcaggcaggtatgtgctgactgatcatctcccgtccgaagacaggctaatagaagctgttctaatcgtgcatagtaatctgcagtttctgaagatttagatgaggtaactccagacccggatacctggcccaggatcgctggtgcttgttgagcaagatgaagagcagagatcagatccgatccgttcatctcacggatatcagcgacgggaccagccataatagactgtcaaaaaaagacaacacagcttcaaatgaccttgagaaaaatggtgctaagccgagagagcaggggtgctcctattaggacagatgttaagagaacagagtgcaccagagcttaactggccagagtcccgtgatccggtctcttatcggggatccccccaaacgccaacttctccaccccgcggagcttgggttgctttacactcaacatctttcatttttgttctgaactatggctgatctgacagcccaatttacaatgcacctccagtcttactaggggaattcgttattattcttcccttgactcgaccttgtgaccattgatagctcgacacgatgtgggcacccccatgtttctgccctagattggccaccactaattccagtaccctaggtttgaaaaatcgctttatgaccttataaaaggtctccggggtcacaaaggaggcgaaaatgaatacatccagagttcattgcgtgaatgcaaggccgagatcaaaacacaagacatgggtactaactacctatttacccggcaatggatttgatgctgatgtcgagtagacaaaaaagctacagccctattgaagctcatctatcttgaaatgtttgggtatgacatgtcatgggcatcttttcacgtcctcgaagtcatgtcatccgccaaatacctccagaaaagagtcgggtatctcggagcagtacagagcttccgaccagatactgaagttctgatgctggcaactaacttgctgaagaaggtttgtaccctgcatagcttcaaattccccttagtcgctaatgctcttgacaggatattgtcacctccagtattcccaacatgtcactccctttggtcactttgccgcacattatcacaccttccctagcaatgtccttgcttcctgatttactctcccggctttcgcactcaagccctgtggtgcgtaagaagacgattgtctgtctctataggcttgctttggtgtatcctgaagctctgaagttggcatggcccaagataaaagaccatttgatggacgaccaagaggatggaagtgttactactgcagcgatcaacgtcgtttgtgagcttggttggcgacgacctcatgacttcctccctctggcacctcgattctttgagcttctggttgatagcggcaataattggatggctatcaaaatcatcaaacttgttagtcccctatgcccccaaccctatggaatgactttcttctgagcaccctctgacttctgctagtttgcaacattaaccccgctagagccaaggctgactcgcaaactcctgcgtccattgacgaatatcattcaaaccacatctgcaatgtctttgctctatgaatgtataaatggtatcattcaagggggaattttggacggagaagagaatctccaggaaagggacgaagttgccactctttgtgttggtaaattgcggggtatgatagttatggatagtgaccctaatcgtgagtatccttttatcgcatttcaaatatatgatcactgaccatcgaggcagtcaaatatgtcgcacttcttgcgctgaaccgcattgttgctacgcatccaacgttggtttccatgcagcaggatgtcattatggattgtctggatgatgcggacgtctctattcgattgcaggctttggagcttgccgttggaatggtcaacagtgattctctccagcaagtcgtgaaccgtctactagatcagctgcaacaaacctctgtgcctgcagctgaattggttgatacgcccgaaagcccgaaagccccgaccttatggcccaacgactaccagactgaggttgttcaccggatcttggatctttgttctcaaaagaactactctgaaattgttgattttgagtggtatgtcgctgtgttagtacagctagtcggacttctcccaccgtcggagagtgaagacgattggagtcatccgaaagagcaagaggctataccaaattcgaggatgaacgttgcgcttcgaatagggacagagcttcgcaatgttgccgtaagggtaaagggtgtccgtatggaggccacaagggcagctgagtctctcatgtttatcgacaacagatcaacttttttctccttcggttcaaccatcggcgatggtgtcttaggccccgtcgcctgggttgtcggtgaatatgctgaatatctactgtcgcctaatcggacactactgtcgttgatcgacgtctctaatgcatccctcgcccccagaactctttccctctttttgcaagccattccaaaggtgtttgttcagattagccagaccagtgaaccaggagatctttggagaagtgagatgtcgctattacttgctcgagtcgttgacttcctcgagggtttggcagcccatcctgatctggatgtgcaagagcgagccatcgagttcctagaagtcctccgcctagcagctgaggcattgacttccgatacacaaaaaataccatttcttctcgcttccgtcataccaaacctattcacagggctcgaactcaaccctgttgcgaccactgcgcagaggaaggtcgtcttaccagatagccttcgcctagaggagcctttcagtcacgatctgccaggactttttcgcaacctggacagcccatcatcgcacgggtcaaagccttgggaaataacagacttctatcatcttcctgaactctcgtatccgaacaagcagactcgtgacctcgcaccggttgatttgcagccccatgcgtcatatcaaaactttaccggtcctccggtggaatcctctactacactacaaagaagaatgcttgagcgtagagaacgcttcaaggatgaccccttctatatcgctccttccggagaatcatctggcacatctacgccattccacgaagctctgagcacatccaatggcgaggtcttggacattgattccatccccatagttaacttgaagttgggagatgaacaggtcagccatgctgatctcgatcgccaaagaagtcgtcgaccacccgtgaacaaattggtagttgctggcgatgagacctttgaaactccgaactctttgacagaaacccccaggactaagggtgcgggtgatgaccatcctatgtataagcgctctctgctccaagttgactcgagcagcctagggaatttgtccttggaaaaaggcccatccccccaagtttccgcagatgaaggggacacagaaatggcccgagcattgcgacaagtggaggaagtacgattgcagatgcagcgagcatcggagcgaatccaattagagggcactccggcagaaggaaccctagtcaagaagaagaagaagaagacaaaaaagtacgttacttcagaccgagataccggcacggtggttgaagaccctacggaacccgcgacagggaagaagaagagaaagaagaagaccaaggaatccgaaaagctaccaggcgaaaattgaatatcttccaggccggcggagtgaatcttgcaacacgtgtggtatttggctcaagcagcaacagtgagatacaatcaaataatacatatttcaaaagaaaaaaaaaggctctctgacatgcgaaccatcttgattttgacattcatttgttcccaaatccatcccttgttcgtggtccattgacccctcgacgtgagtgtggagtatgagggatggtcggtcatgctgactcgagacatatcggaaggctataagctagggtattggcacagtaggtaaatcgtcgcttgaagtccattttatcctgtgatccgtgtgaaccatgaaaccacagtggaccagaggtcagggacaatccgtaggagctctagaagaagaccgccgcaaacaacaaaagcgagtagcactagagactcttcagcacggcttcaatttaacagtggagttcagacacataccaacccagcttgctgaaaggggcgactttgtgttcttcttcggtttaattgtggttggcgcctttcccctctttgcggcttcggtcttcgcgaagcggtcatttgctcgacgttgctgtggtgtttgtgcctggtgtgtgttaatcatcatacacaacaaacctatagcctctggaccttaccatgatggtttgcgtatgagagagatttgagggagacagatggatggggaagggataattcaagacgtgaatgtgccggcaaaaaaaggccacgttgttttttggggagacacgttactatatacactttggccccctgaaattaagtggtttcaatctccagactaattgcgcgatggacgagtagttttcaaaatagattcaacattatgccttcgttgtcctgatattcttataaaaagaacaagaagctatagacaaagataggtatagggaaaaagcttggtttgagatggtgtagtctctgccacaaattacgtacattactgtaatctgtcaaatggagaatcctgttctttcactgtctagagagaataaatatacatcgatgtccaatatatacgattatactagtatggatatacgacatggagtatacggggaatcagacattccaaaggcggtgtaaacagtcggagaacaaggcggtcagggatgacatcagtggacttagtcatcttagtcaggctcagacatcgacctcggtaactacgattggaagacatagttatgtaccctagttaggtaatctaaaaccagcccgggcacaaagtaatcttattattcacttgaaagtctggtattgtaatatcgctacactaaatattcagaatctaagattgattattgtctatacatcaatgggccgtttatcattgaagaagcggcttccacccgatctgctcactggccgagtcactgagaagatcggtagagcccgtatcagcagtcacaccactccctggactatcctgcgatgatgtgtgttgactagaaggcgatactgccccgaccttcgtctgagaacttagtgatagcggtttacgaggaacagccggtcgaactttcgccttttcaactgcatggggcgataaagaccccgtgggggactcgaaagtatcgcgtcgcggaggtagcatgggcttctccctcgtatcttgaaccgggtcggtgtttctgttctttagggagcctagacttggtacccaatcgacatccgcagaaaatggattggattttcgttgaggatttggaatatacccttgcttcggtggttgtactgttgcctttacggatgcgcctgtcatgcgttaggaacacccgccatatccgcagaccaagacactcaccattgtctagccaccaccggcttctgtcagagcttgccggtggcagccccggtgcgatagaaacatgtgttgtcatttcgtcgtcgtccaagtccagaagagagacagagtctgcgaaagaattgtgaccgtggccctgtttctcctcgtatatcgattgtctgaggctttctttcagtgcatggtcgacgatatcaatgacacaatcaaaagttgcccagacgggacgatggtcagacactttcaaatccgcagtttggtagttcgtttgccgcagattgcttcctctccataaaattcggtcacaccatgcagggattcgtgatttttcactgccatatgttagttgcctcttggttagattcacagtgtacttacgacgtatcatagatgtctcccccaacgtcgtacttataagtcggcggaaactcgattgggccttctgaatagaattgaaacaccctgcccgctaccatctgtagattcaactattgttgttagcccaacgtcgggtgtcaaagggttatttgccttacttgatcattgtcgtatagcctttggtagtctcgctgtaagatgagctctcttacgcttgggttatccaacccaattcgatagttgaaatcacctaaccagatcactgcgtcatgatcagcgattgaccggttcttttgaaacctcagcgctcggtcgatgatctcatagtctctatttctttcatcgtagtttgcaaacccggcagcaagatgagcggtaacgaagcaaatactcgtgttggagaagtcgaagcgaacagcacagccgcccttgttaccagcaatcccagaaaggccggtctgtgaataccagttagttggaatagccccttggaaaatgtagaatgacttgccttcttcacactgccttcaacattcttgatatacttcagcgaactctcttttacgtagagcagaacagcagcgccgactagctggccacttctcaggtgcacgtattttccagtccctttcatcttcgaatgggtgtttaaacaatcgtggaccgctctttcccagaccttgcgggtgctgggatcggtggacataatttgctgagggctcagggcgacgatttcctggaatccgacaacaaatattgttggatcttcgtcggactcatccgactccgggaaaagccacggagtgagatcagtacctgggccttcattacgtccattcacattgaaagtgccaacccagaaccgaacttgttttcgcgaagaatattctggagttcggtggttcaactcctctataaccaaatcattgattggatcgtagaggtatacagggagttgatttgtgagcctccctaaaagaagatcaatcgtcctctgtctagccttgtccgtgaaattgttgacataaagtcgagtagcactcttccgcgcatctgcaagtgcccccgcaagtgacatctttccgtgtcgggtgaaagaggatttgagggcgccggtcccggcataaatcttcgaaagagcatcaccattgtccgcccagatggtggaatgccgaacctgcatgtccgaactgagcctgccgccttgctgcgataaaaaatactccaatgccatcaaactgatgatagtctggacgaggtttgttctatccaggcagtccaggcaattggtccgaaacacaccctcttgctgtaaaatgaccgaagagttgttcactgcatcatctctgtcgtagggggttttgttgggacgatgtgaatcttccgacaaaaaataggaaaactcatctaatgagttgacaagctcatgtttgatctgggagctagcctcatatcccgaaggacctcgggtctcagcaagaaaatcatattcggtaagtcgcaaaagactccgatgtggggacgtcccgtcaccttctttctgtcgcgttgagctcttgctgatgtgctttcgaaacttcgacgacaactctgcttctccaggcttcagctcacttagcagatttaccacatgtactgcgccatattccaactccagagcttcaaagtgtttgttaaatgcgtgctgcgttgcgtcgctcgaccgcgtgacctcaatcttttgctgccccggaatgagccctggggcttgttcccagaaaataggtaccgagcctcggacttgggcatatgaaaatgcaatgcccggtgaaacccatagaatggtttcggtttgcacgaaattggcgacattcccatcatcgtcaatgcctctcgagttaaacctcgtaccagcacggcgagaagcttgccgggatatgattgtcaacatcgaagggaagtttgtccgcacatgaggaaggattgaaaccgtcgctggcactttgagtgtactggcaaatccacggataacacaggttaacatctgcgatgcatctaatttggccttatctgatggtggcaagtggctccgaaacaagagaagcggactgatcatgtaagagttccacagcatatcttcatctagagtatcgatgtcgaatgccacgggtttgttggcccttgcagtattgttagttgaaaaagatcggccagtgaagaacaaggagcggatagcttaccggtcttggaggcgatccgtaaggttaaaatcgagactgtaatagaaactcccatctccaaggagcttcttcaacgccaggaacggatggtcagttaccacatctttcccgtccgtgccgagtccctcctcggcggcgaattgagacccggtctcatggtccaaaccgtactcgtattctgaacgattgagacaatcttatattgttagcaattagtcggccagaaaggtgcataggaaacatacagaagcctacattgtcaattcttgacacggtttctccgggtctcacggtggcagcttgcgaggagccggtgacgacgcagacaaacacatcttcgttgagagtaacaaggccgagagtaccatatccatatcccaacggcctgtagccttccaggtccacttcctctaagtccgagaactcgacttgacagcgtgggctgtccttcgcactggtatcggttgatgtgtagtggaacactagggcatgttcggaagagaccagcgcaattgtacgttgaggttgatctcgacagagaacccggagattcgacatggcgcgagagaaatcagagtgtggggagaagcagtggcattgcttacttccacaccaataagtcttatcctatttcggcgatttctatgtcctagaaaaggaccacttcaccacaagagcccgaacaaagcgaagaaatagcttcgattctcaatattattaaagaagtcctcaataataataatataagaattattgtcgagctgaggtggagttgtcaagagctctcccggtctattctccccgcgacgtcgggagccctggaacaccggccttatcggttgcttactcatcccgcgtctctccacttttttttctttttcttttttcgattcttcgtcgatctccaacaaacacatttctctgattgattcgatatcgtcgtcatgggcttagcagggccgaggaagtatgcgacccaactcatcctttcacgcatgattttctaacgcccgagtaggagtaccaagatcggcaatgatcccaataacaccaactggacccggtccacaaccggattcggacatcggatcatgagctctcaaggctggactcctggaagtcttttgggagcaaaggacgccacgcacgccgatttgttgaccgccgccagtgcttcccatatcaaagttaccctcaaggacgataatctcggattgggtgctcgtattggacgagagagtgagccgactggacttgatgccttcaaaggattgcttggtcgtctcaatggcaagagcgaagtagaactaaagaaagatgaacaaaaacgtgatgacgttcgattggctcgatatgctgccctgaaatttccggaagtcaggttcgtccgcggtggactgttagcacaggagaaggaaatcgagattcctcggccgacccctaaggatgaaacagccaagagatcgaaatcggacaagaaagaacgcacaaagaccaaggacgacggaacctcttcaagcgaatctgatgccccagcccgcaaatccaagtccaaatccaaatccaagaaatcgcgctctcgagacgaaacagatggcaacgaatcaagctcggaatcaaagaagaaaaagaagtcgaagaagaggaaggcagattccgagcagagtgaatctacagacaaggcatctgaagcggaagtcaaggtagctgcaccaatttctagggagcggcggcctatgggacgaaatgtcactcgttcacgccatatcgcccagaagaagagagctatcatggacgagaagtctctgaacgaggtaagctgtgcagcaactattttccattatatctttgctgaccttaaccagatcttcatgatcaaagcatagagtttatgcaagtctgcatctgaagcgcattggatataaaacttggagttatttggtgttttcactttctaagatttcccgtcttgaactagatatatcctgttataaatcaaaataatttcaatctcaactattgttatatcatgtactccgtatataccagctacccgtaagcgaccactcagggtggtgacgcatacgggttatagtttgctgggcgtagacgaagcaaagtctattgtagggagttatagttttgccgagatatagattacctaagctaacccgttccccgggccgggtgccttgcagtatccacattcaacgtcatatcaaacctcagcgtgtttgtccctaatcgcggattgctcggcattgagggtgcacagtcccgactcacgccttaggagaatttgtacaggtcacttgcatcgaatccccgacggagaatcgttccgcgatctaccacaactcccataatctctggcaatctacatgaacttttagcacctctcgccctgccacgacccgagcggagactgggagctgtgcagaaactgtgccaccacagagggttgtccctcctcccattcaacaatgaacggggagacgttgtcagctggacaggcctcggcgtccacatctcagtcgagtcgcggaagaaaacagtaagacaggtccaacacctcttgaatatatccgtaactgactcatatagcatccactgggcacctttgaatattggtcttgagagacgcctacaaacattcgtcgtgctatgccacactttgactatcgctatcttcctgactatcttcttttttacatgcgccatcccgttgttctggccacttttggtcccatatctcgtttacatatctcttttctctaccgctgctacatcgggcaatctcaagggacgtagcccattcatgcgctcacttcctatctggaaactgtatgcatcttacttccctgctcgtcttcaccgcgaggagtcacttccgtctacaaagaagtatatctttggataccatccacatggtattatctcccatggtgcgttcgccgcatttgggacggaagctttgggcttctccaaacttttcccagggatcaccaacactctgctgacgctggacgcgaacttccgtattcctttctaccgagaatacgcacttgccatgggacttgccagtgtttcccgggaatcctgtgagaatattctcactaaaggaggtgcagacggagaaggcatgggacgagcaatcacgattgtcgtgggaggtgcccgggaatctctcaatgcccagcctaattccttacgtcttgtgctgaagcgacgaaaagggttcgtcaagctcgctattcgaacgggagctgatctggtgcctgtcttggcctttggtgaaaacaacctctatgatcaagtagactcggatcagcacccgatcattcacaagcttcagatgcttgtaaaacagactttaggattcaccattcccctgtttcatgcacgtggggttttcaattacgacgtcggactgatgccctatcgaactcccctaaatatcgtcgtcggacgaccaattccggtcatgcagcagcagaaccgcgacaagatcaacgatctatacattgatgaacttcattctcgatatgtgaaggagctggagcgcttgtgggatcaatggaaggatgtctatgccaaagacagagaaggcgaattagagattatctcatgatactacatctttatgtacgggttgaccggtctactatgacaacatgtgaaccctatggggcatattatacagcaatactcatagagaaataagccagaaatgaatccgtacactcgatctccaatgtagttcggattaaataacacgcgcgaaaaagtaaacctatgaattgggtatcagatcagacaaaatcagagcttgcgcaaaagcataaaaaaatagataaaaaagaagagaaaaaaaaaaaaaaaacacatcgaggctttcatcctcggaatggcgagctgaggttcggatcgcatgaggtagcagttgggtttagacctggcacttccgctgatgaggatactcgtcggctttcactagcaatgctcctgttcttagcactgtgcccactttctgctcgaacctgaatcatttcctccagcatgcgtgagacctcgtccatattcttccccgggtcctccttttcactcctatcagacaagggacgcttgcctggactcgcagacagtgcaccgaagccattggtccctgcaaaattgtctacatctcctgtagtagagccattcttgctcttcaactctggtgactgcgagtcattagtcacagcagccaagtctcgatgcctagctgcggaccgaagcgcagcaagcatacgatccttatcatcgagctgcaaccgaagctcattgatctccatgtctttctcacgaaccacagcggagacatctggatgctcggcaattgtagcatttacaggcttaatgccccctgacattcgggaatgactggaccgtcttgcctgaagcagccggcgctctagggtagagatgtaacggttcttatcaccgagatcagcctgcagcgcagtgatctgtcgttgcaagctggctttgccatcaccaaattcaccaaggtcgtactcgtcctcgttgccaaacgaacctcccgtgtatatcatagccgacgacggatcgttgctattgacagacatgaacgagatgggccgaatcgatgaatgaccggcacccagtgtagattggctggcggacgaacgtagtgaacgtgaacccgaatccgttgcagacatgcgagaaaaacgcccaaacgcagagaggctattatggttgttgacaccggtggacttggagctcaaaatcaggcgattgagatgttcgatccgctctttgagcgcagtccgagccaactgcatttccaacacctgttcctcgtgtcggacctgtgcttccttttcatattgttgttcgtcccatttgagttccttctccgcttgggatttggcctgagtatcaagctgaccacgaagagcctggatctccatacggtaccgttcaagtagtacccgacttccggaatcaccgccaccgccgccgtatgcctcctcggcctttttagcatgactgacaatattattcttcgctcgcgcagcgaatttcatggtattcagagtttcaccggtatgcgaattgatcgcactcgaaaactgaatggtgcagagaatactcacaagcgaaccaccggacaaggctggttgtaggagtctggtcaacttgctatcccggtaaggcaaatgcctcccgtcacggtccatggggttgccttgcttatccttattttccgagagccgagagatgatggttcccagagtgagcagacttttgttaatatgagaaccttctgtgcgacgttctttatcatcggccgcacgctcagagccagccagatcaatcagactcaaggtcgacactcgcacaccacccgggggaatcccggcgcgcttatcttgagagctgccggatggcactcgctctcgactctcgaccacgatctgaaccaccgcgtgacttcgagaactgcgcgcattgaactgtgtgctgctcgttcgtcgtgcatggtcaccccgggcgataacacggaggagttgtgtcgggctctggacaatctcttccttgagcggcgttgcatatactcctcgtttgctgtcctctctcagtttgatttcctcctgctgggttcctgcgggggcgttggcagcggaagcggaaaggaggtcgttaatcttctcgttgtagatttctagatagctgacccgcagtaagaattcccgatgtggggtctctctgatgaaggaaaagatgtcggtgattgcgagcgggattacaccgggcgaagtggctgttccctgcatagagaaggtctttccggttcccgtcataccatatgcaaacaccgttccgtgatagccctccataacgcgccggaccagacgtttggcagccgaatcataaaccttggcgttgttttcttgtggattaaagacattatctgttcaacgtttagttacgaggggtgggcaagtgagttaaggagtatcattctcaccataaaagtaatcgcctccttctttcccacggtatgagatgaggctttgccggctatcgacggaccattcgccatgattgcggggagtttcccctccgctgttgttgtctggacgaacgcgcacgctgaccagcacattgcctttgaactcctttggcttagagcttgattttcccatcgcatcatctgcatcttcaaaggttgtcgcactcgttgagcaagatccttgggcagaagaacttctgctgtgggttggagacgcctcttgatctcgcgcgtccccacttgatatgtatttcccctcgccactgccgttgagtaatgatagggttttggagctccgataactgctcgtagtgcctgtgctcagtcgcgagcttctttggggtcgcccgttggaagtagcaccttggattccagagatcgatgatgcagtggatggacgactgctggcctttggtggttgcgggaacgaggcgatactaattgttcgtcgcaaagatttgtcggggctaccaggagtgcgcccaccggaagctgaccgagccgcgtttaggttggaggttgagtttgaacttgatagaggtgacttgagcgatggtttggggctcgatggggtccgcaatttggaggtctggtagggggatgcagcatgtagcgcgtcggaacccgtcgaccttctaggtttcgagttggggaggggctgcgacagctgcgagggctgtggcaatgtcgacattgaggccatggcgaatttgtatctcctaatgcgaaatggggatgtatttaatgggaatcagtgaacgcgatggccatgcgggcagattgacgaggtcgaggttgagcctatgccatttttcagagttagccaaatgaataagacgtgaggattgggcccagtcaaggcccatgagataaacggggattctactgcagtttttttcgccaaatgcagtcttggggggatcgtcaaaaaatacatcgcacacggatgttatgatgttatgattttggtctcgggtactcacggattcaagacgtgtgatgttgcaatcgcgacggggtaagaaagaagtggagatggagatcaaagaaagtcacgaaaggtaataaaagtaatgaaaagtaaagatgaagagagacgcgaagacgcgaagacgcaaaaacgcaaagacgcagagagatcagagagaaatgcaaatcgagtccccgcagaaggtcggggccagactgcgtgtaagactatatttatggatgtctgggtgttttatattacatcgtcttctctaaatccttatttcaatccttatatctatctatcattctctgctctgctcctctctccttctctccttctatcagtccccctagactcactatcatagctgagaaagcactctccttctcttatatctcccataagagccaagtatatgaaaaaggggtcgctaaaccatcacaccttttcgacgttaaaccgaagggggaattcgctgggaagctcggggcatctcatgtccaatgatagacagtggaggtttcaggttcgggtcaggaaaaagggggcgaatgagatgtttaagtctgcagttcgttttttttggtgggaccaatctcattatttcgacttcaaggtaggatcgggagattgggagctgctcctgttgtcctgttgtcctgttgtcctgccacattaccgcttgccctcaagggttgaaggagtagactccaggtactctccctctaaaggtgaagcttgggatgaactcctgttcgagacagtaccaaaaagataacggctattcgaatcaagcaaagattgacgtctaagccaaaattaaaattaatctgacgttgatcctcatttgcgtcccgttgtcccgtgatctgtatatctgtataactatgtacatctgcatctgctgtatacacttatatgactgcaacatacaaagtacagtgtgtaactaactaactagtcatatttatattggatctatttgtcattcggataacctctttttatttcaaactcaatctggaagcgaggaatacatctatgcaagggagcctatactcatagatcgcagccctaacttgaacagtgcgaacagtgcaacgtgatagattggtgatcgtggggaaaatccataaaatccctgactggaggacaatccaatagttgttgcacatgtcaatgtcatgcatatctaggtagtgtctcgtaatacacaatactattattagcgtgcttttgcttttctttgtctatactgtacatcgaatattgtattttgtctctatggtgtcattatttcataccgaaatccagttgccgggcagcactgttgaacatgccctcatccagctcgccgacacgtcgggtcaaatcatcgcccatctttttagtcccacccgatttccgcgggagatcttcattcttggtcggacggggttcaatggtccaccagttgtgccgcaagcactggacagccgtactgcgcttgcggggatcaagcgcacacatcgacatcagcaaatcggcacccaccgggcctgcagtggggaactgtcgcatgaagaaatcgcgcccttgcaacggtaccaaatgggccttgtcggtgggaatgtagtagggcaacttgctgacccctggccagttctcctctgttggtgtgccgaacgcttcgcagattttggaggtttggtccaggtcggtgttacctgctacgaagggaacccgtagcaggagctcggcaaagaccatccccatggaccagacatcgactgcgccggagtactgtcgcgcaccgtaaagaagctcgggtggccgataccaccgagtgatgacctgatgggtcatgttgaacaagggatcggcaaaggatcgggcgagaccgaaatcggccaatttgacctccccatctgacgcgatcaacaagttgttgggcttgatatcccggtggagaacaaagttctcgtgacaccaccatacaccccgggcaagcatccccatccaagccttgatatcagccacaccgtagtgaatgtcactatctttgatgagcatctcaaggtctccaccaggaagaaactcaagaaccaggcttagattttgatccttggaagagaaaacatcgtggagggcaatgacattgggatgtttcagctcttgaaggtacttcacttcacgaaccgcgtccatagcaagtccatccttgtattcggcattaactttgatcttcttgatcgcgacgagggatgacggatcgtgtcggaggtggccaacatataccacggcatatgtaccctctcctacttttttgtctagttttaagttagcaaattgatccttagaaagtaatacagcacatattcagctacctttgacgtatcgttcccgaatatcgatatttaattgttcggtaagttcgcgatccccattctgcacaggctttgccacagctgcagctgcaggcccagtaattgagttctgtgcagcagtggctctgagtctgattgctgtatttggggaatgcacagtcatggatggcgaacgagagccgaagggtgagagtgccatgattagaatgatttgaagcaaaaagtcaaactcctgggatagacagtatttaaaaaaaaaaaacagccacagatactgagtggctattcttaatattaagagatcatctttagcaaaatatcttctaaagtcaaggcagtagtgtcaagacatgagggccgatgtcattcccaagataggctggttcggagtattgttgatcctggactttgttggcgactcccgaaatttctccaagtccgtcaacagcgaccccagccaattcctcggcaactgctggaaaccagtcaatctcaaaggcctcgctcagcagttctcctcatccacaccactacgaatccaattttccggagaagaaaaaagtacagttacgagcaaagtcggggcttgcagcatccttcccgcaacaccttcactatgagcgtcatggcaatgcgcaattcgccgctaggcagcttgacagcgcgcctattcaagcctgtttcaatttccaaccaatacattcgatcactccacaaaaacgcgcccccgcctgtgccatctccgacccctttcgttcccgacgttcagaccttcctcacgctgattggccgcgaaatgtctaagcaagcgagcaagatcccctcatgggaagagcttttcaccttaaactcgaaccagctccgccaagccggcattgagccagcccgccagagacggtacctgatccggaagcgcgagaagttcaggaacggactgtacggccctggaggcgatctggagactgtggttgatggtgttgcccaattgcgggttgttgaagtgcctattaatgccagaggcctgacacatgaaggcgcacaaacggcagttcaaacttcttctgctacactgtcacccggcatggtgaaagccattgttaacctagcgcctgatgtcactacgtattactatggcaaaaaaaacctgatcaagaaatttgcgcatatgaagattcaccgtggctgtcagccgatgggcccgttccttcagcctttgaagggttccaatggtactgctgctaccatttcggtccaggagggtatgtgggaggacaagcggggacataaggttgatggtggcgagcgacgacgccgggaggtccggaacaagaagaggttggatgagagaaagaaggcgtgaatgtgaacggtgaaataccactttgtgtatcttgcatatttcctgttgagcctggatgttcaaattcgaactgtactatactattgctatactattgcaatcatgattctttttccatattctttacatcttttacgtgttttctagggaaagaagcgagatgttgttatgtgcctgattaaaataatatgactgagctatgtaaacgtttagagaaacatgcgattcaaagccgcgaaaggtggatggatattcatacaggaaaatcgtttcggagtgaagaaagagtaccatgatgcgagagctgtcaattccaggcggacttggctcaaggtcagtctgaacctttgatgcatcaatgcagagcattaaaaatgtgatcaaaatttgaatgagaatcttttctaaaccgttactccgatcatgctttgactccacgtctctcatactgaacaaatgatgtacccagaggcttggagaagagggactagaatatggttagtcaaatgccaggtcgatcgcaatagggcatcacttaccgaatagtccgtctcggggaagggtgtaccggcgataggcgtggagaacttgaagtgtctcaccagcgcagccaggattgtgcccagttgcacataggcgaactgttcaccaatacagcgatggcgaccagcaccgaaaggcagataaggactgttggtgcccttggttaccaatccataaccatagtcgatctgctcctcatcttcatccttggtattctcagttgaagcctcatcccagcggtgagggttccacttcagaggctcggggaagaactctggagagcgagcagtaacaccgggagaagagaggacattgtgagtggtgggaatgacataagaagtgccctccacgggcatggggttcttgacggcgcgaatgatcgagtggataggagcgtggatacggagggtttccttgatcaccttagcgtgcaagtcgagcttctggagtgcttcgtgggtaagaggaggcaggtcagagcccagaacctggagttgttcttggtaaagctcctcaacaatctcagggcagctggccaggcgcagaacaatccaggcagcagtagaggacgaagagtgctggcccgccataagcagcgcaatcatcatgtgggcaatttcctcatcaggaatcggatttccattcttgtaggtgcacgacatcaagttccagaccatatcctcggagtccttcttatcaccggctgcgcggcgcgccttgatgatgtccatgtacgtctcggtcatcttcttctgcgcagcatcgcgcttgcggttgtgagggagcggggcccatggcagcatgaagttgataggagcgaaacccttatcgaggtcgtggtacatttcagcaaaggtcgagtcgaatcgatcgcggacttcctgtccttgcaacgagcgggaggctgtgtaaattgtgatttccgcaatgaccttggaaacattgaaagtacccttagggtccttgaacgcggaggaattcttcacaaagtcatcgacctcattggtgatcaagtgaacataagaccgaagtgcctcggaggtaagcccgaatttgacaaactaggcaacaatcagcagcccgactttttggtgtaatccattcctgcataccttcttctgctccatgagcttagcattggggcaatcgtagacgacgtgacgaccgaagacgggggtggtgaggggggagtaaacctcttcggcgttcacatcacgaagcttgccattgagaataaactcatttcccttggtgcctaggtagacggtggttttcttgcccaggaggacaaaggtgaagatgtcgccatactgcgtttaacctcagattagcaattgaattgatccatgggccagccagacatctgcgatcgacatacctttgcgcgagcttggtcgaagaagttgtatgggttcatgccatagctgatggtgcttccaataaaggggacccagtggaagaccacggggggctcatgggatttcttgaagaagagctggcacagcacattgatcacaatcgatagcgcaacgaatgacagtgccccgacgctggccaaagtgtagattgactgggtcgagcagtgctcgcagaaagtggcgaggaaagttgcgaagaggcccatgttgtcaggagatcaaaggagagagagaagaaaaacagcgggaaagggaaagaaaacgggctcacaatgaccctacgaccctgtttgttcgtccaattgaataataaagaaagagagaagaagttgagtgaaggttaaacaggaggcgaaggggaaaataattaagtccgatatcattcggcgagagagacccgcccctttagggagtacgaagtacggagtatggagtatgtgtctagaggagacgccaagcgatataatttgcatcgtaagttatattttatttcttatttggtgttagtgaacctattttgtgtctattttgtgtctgcttgtgtctattttatgaattatctctcttttatgtgatagcattggctatatagccacatcatgccactccggtcaaggggttcccgctagatgggacgtatattgactattgggagtatttaaacacacaggacggagtacatatcaaactattagcgtatggagtacctagggagtacatagcatactatctcctcttgtaaatgtatcatttcacctgattttgacctaataatacatgaaccctatccttttgacacgcccctagccctgataatgatatcccgaagtacacgcaaaagtcaataataataaatcaaaagttgcacaaagccacacagtaccccttaattgtcgtacaaggtgggatcgccacgctctccaatgttgatgaaatctttcggggcccggttgccacttggtgagacttcacgttgggatgccttggctgggcggttatggacacgcttcccggcttcatttcggaatactttgaccggttcctcgctgccttcggcgtgctcgctgaagttggcatcgttgatgctgctcaacaaggtccgctcccgttgcaatttgcgcttcgaaaagtccagtttaccaatagcccccgtcaggccatctgtgctgtcagtgagactcgggtactttccggtcatccaaggatgctcaagacactcatccaccgtgattctcttgtcgacgtccacggtaagcattctgtcgattaggtccagagcggggtcgccaacggagtcccagtacggtgacggatagtcaaacttgcccatcttgatctgctgggcgagaatgaatgggttctctggagtgttcagttcatccgagaacggcgggaagccacagagacagatgtagagaacaacgccaagggaccatacatccacagccttggtgtatttccggtggcgggtatcttgcaaaatctccggcgcaacgtctgcgaaattagtattaacactgcggttccaaggtcatatgctttgtgacttacagcttggtgtaccgcagctggaagcgaattgttagccatcattcacattgacacggacagacatcacctacagggttgtcgtgaaagattcctccccaataattttagccagcccgaagtcacccaatttaacgttcaaattcctgtctgcaaccaggatattttctggcttgatgtctcgatgtacaatacctcgttcgtgctgatgacacgttagctgacccagtactgtatatgtggacttttggtatgcataccagatatttcaatccgtcaaacagctggcggaacacaccacgagtttcatcttcggtcattttattattgttcacaatccagttgaacagttctccctccggtgccaattcaagtaccagataagcgccgccactttcatcgaaggattccttgagacatagtagattcgggtgatgaacgcccatcaacaacgcaatctcttgctgcagagcattgtcgttctgtgacttttgcgggtcactgaggcgtctttcaaagactttgactgcatacttgtctccagtagatcgttcagcacacagatagacggttgcaaagtggcctttgccgagctggctgagaatccggtattgctgacggaaaccattcgtttcccgagtacgggggtagcggaagacaaaacgggcttcattcagaattgaaacttcatcgccgtcctccagttcccggtgcttgttacgcccaacaatggcatcattaacaaatgtgccattgctagagagatcctccagcacagcaaccacatcgcctttcttcttttcggcaaaaataaggaagtgccggtttgaaattgtgggaatctcaagcacgcgatctgactatagttagaacagacactcgacaaccatcaagctattacttaccgcactcaggatgacgtcctaccaaaaatccacctggcgacttagcgctcttggagatttgggactttttccccttggctttggtagtaccatcatcattaccgcaaccattgcgcgtcctcagcacaagtgggccattccccttctcatccagtggtagcaggtagccccagaccccttcagcgtcctcatccttcacatcgtccgcgaatgctctgggtggatacacgaactgtgaaagcgcctgagtatcctctaatcctggcggcgaggaagtcgcgtgttcgggttgggatgagatttgttgatggctgttgcgcggactttcggggggtgtaacagtcacctcattatgagtttctgtggtgacagattggggaccggtgactggggttggcaagtagttcaagtcgactggcgtgtctcgcggttggacctgactcgagattctttgagagcgtcgaggtttcttttggtcttgtgaatctgcatcgatagtagcctatagtaacccctgtaagaaaatgagttgcgccaataggaaaaagaacgtacccttcctcgcttgagcgagcttttctcgcgggggggcataatacaggctattatcaccctgactggagagggctccagaccaattagcgatagttgtcaattcaacggtaggaacgtcaataaagacctttttcgatgccgtaaagaaaatacacaattgtagagggagaaaagaagaagtaacgaagaaagatatgatagtctatagcatgtttgggggaaagagacccccctggtgactctccgccccaaaattgacgagcgcgaatatgagaagtaaagatatgtttagatatggtattgaagctctaaaaccattgaatctgtaaacaatactgtatataatataatacagcatagtatagtatagtccaactagtatacttcatgtcaacaaataattatgttgttcggacctaacacgtgctgtcccctgacttcattcttcggctttccacccaacctttaggcccttaagtccttcacaatggacgggtatgtgagattcttcaatgcttagaggatcatgctaatggacaatcaaagcctttcaggtggaattagacgtttcgcttttgaaaagctcgctgccttggcagttgaggcgcctgtcaatggatcggagcttgctcgcctcgcggagcagtctcagtcgacctccgagtctgatggcgctctgaatgaagtcttgagacaacaggccccgacatcgcaggttccaatggtttgtccctctattgctgccgacccctggtagtgtagtgggtgcaggctaacgtttggacagggaatccgtgaactagatgtcctcctggccctatgcaaggcggcctcctccgtgaacgatccagaaaatgctgctcaattggcattccaactctcccggtacctgccagaatctcacagccagctattccggtcctcgcccttcctccatggcgtaaagccgtcgccttgggagactctcacgaataacctggctcttgcgcttttgtcgttaggaactaaatatccagacctgcgacagacaactctggaagctgtgcacggatatttgaacaactgcgccgaggctatcgctgcggtcacgccttttcaatattctagatctgacgcggggcgacagggtgttatacatgaatctgttaccgttttgtcaatcgccgtttcccttgttggatttatggaagcatccgcagaatacacttctatctggcatgcgagcgaaaagttacaggtggtcgatcatctgcgagcgatgctgtccgagcctttcctaatcgcggttgagacggcttcgtccactcttcgcaatgcaaacgtcgcggagcatgctttcagagactggagaaaatatacccgtcgatatgctgctcatgctcgcccattaggtgctatgcttgtacaagaaggctatatgcgctttgtgaaatcatgcgcatcctctctgatcgggttccagcacctaactgatgagcaactcttggatgactacatgactggcgttgggattgccaaaagttatgacgaggcggatatctctctagtcgaacgcgtgacggatatcattagtgaggaaattcacttgctagaggatggctccgactacctgcaagtcgggtctccttggcagcagcaccttgccttctctgttaaggggcatgccctagtaggtttccttaactgcgtgattcttggagaagatgcaaacaacaacgaaatactgctatcctggctcgaagatacattgcttgacccccagcaaatgtcgaacgaggaactatctgtgacggttctgaagtgtaccgctatccttgcaaggatgtctccaaatggtgcgtctattggaagacgctgccttttgaggtttctggcccaggggggtgtctcggctcgctccaccgttgccgtcgcttctcggtgccttgctcagatattgactattctttccgaggacgctgtaatcactacactttattcacttggtaatgcgataagcccgagcacgaacgtggaccaatctagccaagaccaactcgttggggatcataccgggcccgggatgaacctcgagacatacccaaaaaatgcaagccagacttcgctctcggcaaatggcgaagatgacactatcacctacaggaatgtcattcatgccattgtgacagttgcgactaattgcaacgatgacaaaatcagtgcattggcccagtctatgctgctccaaaagattggcaagctcaatgtcgcagttgatgcctttatcatccaggaaactgctgttcttgctttgagtggcggacaagccgagttccagcttctgttgaagttctatgcacgtatctacctagatggtgtcaacaaaggactgagcaccatctctgatgctgtccaatgtgccatggtttacctgtcgatcactttggatcaaaagtcaccactccacaggatttatctggtccatttattggaaagcattatcaacaagggtgatgtgccagactttgagtatgagcggcacaaggaaattgtttttgccgcggatgatatcacccccctcttgaaaccactggctctgctcgtgtcttccaatggcagttctaccgggtctgcccggtcagagtacgatgaagccattctaactctgttccgagatgcttggttcaatatcgccatccatggaatatccctcagctccagtgttgcccagcggcatcacaaggaactccgccttctcgcacatcattctccacctttggtggctgaaaaccacatggactctctggagagcgatgtggaattgaacacggtgcttagacgcgggatgggaccgcagcgaggcacggaacagaagagagctttgatttctgaactccctggccgagaatctgatatcaagaaattggactattcaggagcagtgtttcttaacgctgtcgtcttgatcgagagcctccgcgcctcctcaggggactctaccaagacgcttagttatttccttgacccagccttggccaccccggagatagttgtgtgcatgaatgctgttgcagacaaagcggttacttgttatctgtctcttacactttccggggagcacgatgacttttcgaccccttatctgtctaagcagcttgccggattcctggtggcttgctgtcatcgtattgagagggttcagagtattgcaacgcaatgtgccgacagaatcattcgtgaatgcccttctgcattgtgcgaaaagcattcgctctttgctttgcttgagattttgaccgtcatgtggtcttcctgtcttcaaggagaacttgatgagtttgactggaagccgtccttggtttctcccatgggcattgtcaaggtcgaactgcccgacaactatgcgttgagaagagcgactctgaatcggttccatgaacgagccagaatctgggtgacaaccgtcctaaacattgccccattagatgtcaaagggttactccagacctatctttccgaatatgacgacgacggcggctatggacacatttcgatgggacgttcattcgctctcgagatgggttcccttatcccacaaagcgacccacggcttgggtcgatcgatggctacggaagcagcgacttcaatgtcgcatctgacttcatggcactatatacgacacgccagaagtaccgacgtgcggacatgccttctctcggcggcctaggagggaatcttgatagcggctatgttgaacagccccgcgttaatgttttgtctgagtctgccgattctttggaagaaaccctctctcgtctatatggacggagcattgctggtgaggatattccccttgtggaagtgagagatgtccttcggcaggctgcgggacttatttgcagcagcagcaagccacgactctctgtggttcactacttggttgctttgcctttccagattttcaccaaggagatagtcaagcttggtgtgtctctctggcttggggtcattcacgagaacccaagcactgagccacggatcctttgtgaggtgatagaggcttgggagagaagcatgaagcgccgtaaaggattgttcgatcctacctttgaatacattgacccaatgtatactaagattgaacttttgccaactgacaaggatgttatgcttcgtacgcagcaaaaagctcaagacactctctcgccgcacctgcgagttctacatttcttcgagagccatttcaatgccatccgcctaggaaacctgcaagatcaacagctattgtgtcgcttgattggtagtacggctgttggactttcaaagaccggggcccatccattggcaagagaaattcatttccgcattgtgctccttggtctcacggtcctgaggcatttcagcccccgaaatagtggcgcatcttggaaactaaaggatcggattctgtctgctgctttgagttggtttaggcaccctccaaggtggtcattcggaggcaatcggctgcagattaaggcagaggacaaaattctcagcgaggtgactgcggctttacgagctgtggcaggtatcgctgccaatgcgcaagggtcatgcaaatctttgcaagccaaacaagacctgcttcaaatcctcgtggagaatgaacgatcacgccttcgagtttggctcttccccctggaaccggaacgaaagcaccatatgccttcgattggtggcaaaaatctcgatgacggccccgtatctttacttcggcttgcctgggcggaaaatgcagggttagctattcagatggctgcccggttcccgtcacccaaaatgcaggctgatgttaggtcgctgatactcaatttccccgagaaggtcattgaggagccaagcgctctggagcttatgtttgacaactgtctgcctgctgatgtcggttctcagttgaaatacatgctatactgggctcctgttactcctacggaggcgatcacatacttcatgcccgcttacggcaaccatccttatatattgcagtatgccatgcgggcgctggaaagctattcgatggatgttcggttctactttgtgccacaacttattcaggccctgcgctacgatgctctgggttatgtggaccgctatatcctcgaaacagccaagttgtctcagctgtttgcccaccaagttatttggaacatgaaggccaattcctataaggacgaggattctcagattgtaagtattgggattgtcaacttggtcaccgttagctaacatcctgtttcaagccggaccctatcaaaggaacactcgaccgtttcctagataacttgatctcaagcttctcgggcgaagagcgtgcgttctatgagagagaattttcgttcttcaacgaagttacggacgtctccggcaaacttcgcccttatatcaagaggagtaagcctgagaaaaaggaaaagatcgaggaagagttgcgtaagatcaaggtggaagttggagtgtaccttcctagcaaccctgacggtgtagtcattggtattgaccgcaagtctggcaaacccttgcaaagtcacgcaaaagcaccttatatggcgacgttccgcatccagaagacgagatcacgattgattcaaaaggccgaggccaacgctggtgaccatcaccaccagcgccaattgacgaatcattccgagcctgagcaggagacatatgaagtgtggcagtcagccatcttcaaagtcggtgacgattgtcgccaggacatgcttgccctgcaaatgattgcggccttcaggagcatcttcaccagtgttggtctagacgtttgggtctacccttaccgggtgacttcgacagcgcctggctgtggtgtgattgatgtgcttcccaactccatttctcgcgacatgctcggccgcgaggccgtcaacgggctctatgactacttcgtgtcgaaatatggaggcgaggactctatccgattccaagaagcgcgcaccaacttcgtcaagagtatggccgcctactcagtcatctcttacctgctgcaattcaaggaccgacataacggaaacattatgattgatgacgccggccatatcatccacattgactttggattctgcttcgatatcgcgcctggtggcgtgcgattcgagcgcgcgccgttcaagttgacctcggagatggtcgccgtcatgagtggaacccatgacccagctcaccaccagggtggtaactcgggcattaacctgccaggcagctcccacaacccaaccaacacgcagccataccgatggttcgagtcgttagtagtgaaggcataccttgcatctcgcccttacagcaccaaactgggcaacattgtctccctcatgcttgacagtggacttccgtgcttcaagcccgagactctgaagaatttccgtgaccggttcgtgttggagaagagcgagcgcgatgcagccgagtacatgcgagaacttgtgcgcaagtcgtatatgagcgtgtcgactaagggttatgatcagttccaactgatgaccaacggtattccttactaagactatgtagatgttgttttacacttacacaagacattttctccataaatatataatgcattcatcatgttctgtcactttgcccgaagtgtatggttgacgtcacgacttcgccggcgccacggcgtactgatcgggccatccataacacccctgatatcagagataatccgcaggaaataggatagaagatatactaatgaaaatgcactgtaaattcggcatatacagttacctcagcaatgatagagatacctcatatataacagacttcagggtggcacattcaaggcacgaggatctacacatcgtggtgccggaagtggcaagatgacgatgcgaaggcactggacttagatcagacctttataatgtgcaagaatccttgagtgcagtcccaacatcgaacctggatacatggaaattacatattcttactgtatataataaccaccatctcccatctcaaggatgagaatctcattcctcaataagctcagcggtggagggacagggaccaagtccccgccattgacggacctgtcgggagagtcagcgatagcggatcgcgaaaagagaggcagcaacatggacgagtcgcgtgtgccatgggtgacttggagatctgtgttgctaggcgcatttgtctccattggtggtgtcattttcggatatgatactggccaaatctcaggctttttggagatgaataacttcaagcagagatttgcgcagctgaagcccgacgggacgtataagtttaacaatgttcggtctgggttgattgtttccctggtgagtctttgaaaggcgaagtcggaagatgcgtgaatgtggcaaaagctaacgctttccagctctccatcggtacattgataggagctctcctcgccggaccacttaccgatcgaattggtcgaaaatggtccatcttcttctggtgcatcatcctccatgtcggactgataatccagatctcctcgccaacaggaaaatggtaccagttcatgatgggacgattcataactgggttcggtgtgggagcctgttcactgctggttcctatgtaccagggtgagattgcaccacgacacatccgaggagcgatggtgtggtaagtaacaatccaatactcaacattgcaagatactgaccataaccctaatacaacccagctcctaccaattatttgtaacattgggcatctttgtcgcatattgcatcaactttggcacagaaactatggacagcaccgcatcgtggcgaatcccacttggtatcacattcctgtgggctctcgtccttggaataggtatcctcctcttcccggagagtccccgcttcgactaccggaatggccgtatagaccgcgcccggcgcaccatgtcgaagctgtacggtatacccgagaatcaccgggtgatcgtgcatgagattgccgagatccaggaacagctggatgccgaggagggggcgcaagacgggatccgcggttggcttgagatgttccaggcgccgcgcatgacgtaccgcatcgtacttggtgtagtgcttcaagctctgcagcagctgaccggtgctaactacttcttctattatgtgagtgttttatttcgacatagacacccgcactttgctaatatatatagggaacggtgatcttcaacggggcagggatagacaacacattcgtgacgcagatgatcctaggcggggtgaacttcggcaccacattcggcggactatacgtgatcgagcacttcggacgacgcaagtctctgatcgcaggcgggatctggatgttcatctgctttatggtgtttgcgtctgtaggccacttctcgcttgacgttcagacaccgcggaacacgcccggagcgggcaaagcaatggttgtatttgcgtgtctgttcatcaccgggtttgccatgacatggggcccgatggtatgggcgattgtggccgagctgtatccatcgcggtatcgggcgcgggctatggcgttggcaactgcgtcgaactggttatggaatttcctgattggattcttcacgccgtttatcactggcgatattgactttgcatatgggtatgtgtttgctgggtgcttgttcttcgcggtgattattgtttacttctttgttatcgagggcaaggataagacgcttgaggagatggacatgatgtatgttatgcgcgtgccgccgtggaagagcagcaagtggaagcccccggagccggagaatcagctcacgaccgatcagcttatggatcggaaggttgcgaagaaatttaacaaggaagaggaggtgcctggacattcacatgctgagactgcgaatgatgctggggctggaccttcgcatttctcttgagagttggccttgggtgaccttggggtgacacgaagagttgaagtggtgggctgtggcgggctgtatatggaccgaaggggcaatgaacatactttcagtgtatatactgaaaacaggagatgtagagtacttcaaaatgtagtccgataatgagtgaccaatgggtgtcaatttggtagtcataagaataaagtcatccgcatcacctggatgggatgggtatgaaataggctcaaatatatgaaacgctgatcccagagctgaaaaaaaaagactcaaaagttgatgacgctccatgaatcaattttttttttatacatattccacctattttcaaagaaaagggttgggaagacacatcgagaggatggagaccctagaattgatacaagtctgttgagactttcgacgtcaaatgcagaaaaagtaaaaagaagccagaggaggcccagcagcaccgatcgagatatacttcccttgaaaagtgacgagaaccaatctctaatccataaagtcacccctcaagatcttctcctggaagaaatccggcttattctgcttaggctgacggggaatttcccggctaggctgctccatagatgcgatggaagcggcacgctggtggttaccattggaacgatgtggggagacggggccgccgaaggaaggggcacgcccagcacgagagcggagggcctctgaccagttaaagccttcgcctaagggtcggcgtgatacgttagatctctcatccggaggcgaggttggagtacttgcggaagatcgggtggtaacgatggccgagccggccggaggggaacggcgcgggcctacggcagacggaggggggtagtttctaccatttcctatgctccctgcacgagaatcacgcagagcttgtgcaccaaaggagacgcgtctcccgaactgcgagttgggtgaggttcctgttatttgctcgtcgtcgacagcatcttcgactggaccgttggagcccattgagctagataggctgcctcgacggaagttgcgattgccaccgaaggcggacgcctgggtgggagaaccagagaggcccagcgtgttgattgacagccgacgctggttggattgctgacttggaacctgggttttggatgggttgctcggcttggagaatatgtcggcgatggacccacgacgtcgacggttctccgcatgggggaccgagatgggggaggttggatcgttggacattgtcaaaagaagggggttgaaccgagagcaggaatatagacggactagccgcccttctcatataatagaggatttgacaatagagatcaaagtgacgagaatgatctcagcacttggaagggtggggagggtggaacgatgtggaacgatggtggggggtgttgatttgaggacaagacaagattgaaagattgataccagaactcgaacaaataaaataaaagaagggagaagtatctggagaataagttgagaaaaaaagaagacgagaaagcgagaagggggaaatatcgaggttcaccgagtagagagagctaagcatcacattatctggggaaagtggcgctaagtggagtggtgatgtcgatggctgactcagcagtttctatttcatgacatgaggttattctatcagttattttatcagttaggtatcagttaggtaacagttaggtatcagttaggtattggttagggtattggttaggttattagttagggtattagttagtcgattggtttggattgattgttcaactgcttcaattgctatggccatctgaagatgagtacaagactatatatattggtacttcatgtacctattacctatataacgtctacaattgggttatcgtgcagaatgacaaatgctaatccctgcagaaataagggagagcattcgtattcgtagctcaagaaagtaaatatggacgtacatcgtgtattgcttgtttcccataaagtggcatacgtctctgattcctattccagaatgaatcccctctgtcgacatctgctatcataaatcatagaccatcaaagaagctcttgataaccgcaggaactaaagacagaggagatcatccacatgataagaaatcaggaactcaaggcaaatgaaacaactgaatcagcttacgcccgatcgttggctcaatttcggtaccgtcacgagcgattttgatttcccgattcgcattccaagggttacgaaggcctcgagtgcgctggaaaggtactcgctctgtcgaaatccattgaatgcggaacggtttgccaaaggtttgaccctcttctggatcctcgggctcgacgcttttctcgctcgcattgtcgttctcatcttccgatgactcgacctcccagaagatagtaccccgcactgaatcatcgatgattcgtccttggggcgctgtcgaagttgccgctgtcagggtcacgtcaagttcgtcgggcccgccgggcgggggatcgggccgagatggcatctccaaggccagttcttcgtcgtcgctgatcggcgacatcatacgggcgtatccaaaatattcgccagatttgttggcggagaaaattaaataaacgtaatctgtgttctgggtaaaggtcagtttcggtcattgctgggctacatagctttggactcacctcgaaagcctgattcattgccgcctcgttgtgcgactgtgtagcccaaatgccactttgcttgctcaactcgagatcctccactgtcaagctcttaacaataaagtaccgatctaccagccgggccgggggaggatggttccccgtagcaggcgctgcggaaccgggctccggtgtgattgaatggtcctcgcccgggtccgtagcagtagtcgtagcagtagtcgtagctgtcgtaatcgtagtcgtagccgtagcattatcctccggacgtggtcggagagcattattcggagctgcagacccggagcccggagcagtgagcccctttcgcagtcggcagacaacgcggacgccctgaaatcgggagtcgtgaaatctcgccaaagctgcaacgcaggcggcagccgacttgtaattcacaaacgcacaattactcttggagatcaggaacacgctctcaatgtcgttttttgcatcttgcgagaagtgatctttgagatcaatgacactggctccgggaggaagatttccaacccacagcgcgtggccagattgcttgggctttcggggtggtcctcgtggggtactcggagcggtcgggagtggttgcgaagggggagtattgtctttagatgaatgcaggttagtaacagttgcaaagtgaggggattcgacaagagctcactggagaacggcggttgtggttgggactgcgctatttttttggggttcgatccatccacgatggtctttgaaacgtcgtactccagatccgtcattcgtttatcggcttctttgcgcaaggtgaccggtttcgagggtgaactggtgttagtacgtactggagatatagcctgaggcatttggccggcaggcactccatgtccataagggccgtatgatgaatgagggtaatagcccgagctatacggagatacttgcccgggattgaggtttggcatgttttgcatttgggttccatgaggcgggtaatgatgttgaggttgagggccagggtgttgagggatggcatacggcggataagcagggtaagacatgccatacggcatgcctccggagttgtgtccatacggagtcattggcatggggtacatcatgccttgcccgtgggctgtgtactgatgcattgactgcggattatagccttgtggatgatggcctgggaagttgtatcccatgaccatatttaagggagagggggcggttccataccgagcttctgcgaagctggaatgatgtgtgacattgggacgtggcgctgaagtaggagatgcacctgagaagagatttagtcaggcaaagcttggacggcatttgaaaaggaagggctaaccctgttctgatatcggggctgtctcgtcagctgtcttgtctgaaggaacattgcccatggggccgttgatgaaactttcaattgtaaccttctgaaaactactgggtctttagtgtctgtagggaatggacacatcttactcgagaccttttccttacctaagtcacgtagcccggatgtcaccgcggtgtaggaattcttatagaaatcccaccgacgcaagtaagacttccctaagagtccggtagaatagaacagaacagaacagaacaccgtagaagaggggaagtgcaaagatctaatccgggaaggaaaaggcccaagccatgcaagttagttctccggattttgtgaagaaaatatcaaggatagaatgtgtgtgtgatggtaagaaattgaaaggggaagaaaaccggtcaacacggactgacccccctcctgttaggccataagccgaagctcacaaaacaaagtaggacaaacacatataaagggattctagataagccacggtggacagtgggctaggtaccagagacaggggaagcttaaggctaactgacagccaacacatgccagaggagggggaagaagtgctaggcatgccagggaagagtactgaattcaggtacattgcgagaacaggagaccatccccgttaaaaagaagggtcacataccgagtaatttggctagtgttttgtttcaagaggcgttgtgttactcgacgatggtctagacagaacctgtttttgggccaaatgggattgagaacaaaagagccgagggaggctggtgaagggagctaaaatagtgtagaatcgagggcccgagaataaaaaaagcgccccgggagtcagatatagggcagaaaaataaagatgcccaagggaagctaagggtaaataagagaaagttaacgttgcagagggatcttgttgatgggggaggtcctgatcctggccctggggggattgaagccaatcaactcttcttggcaggctgtggctcaatggcttagtacatattccaaggtataaaaaaagaaaagatataaaaaagaaaagaaaataagaaagaaaaagcgggatgtgctcgggaagtgtatactgtatatagcatttagagtcgctaatatagaactgggctatatggtcgaataggagattgggcattattctgaaaataatttcagaacgaggatcatgtcattcgagcagctgttgccgtatccctgagctgcaggttgccgtcttttttttttctatttttttgtgtcttccttttttcttttctttttgcatcctgtgatgggtatctgggcggggccagtacaatggtcgcgattggggcatattatgttgggcgtgaaaaaaaaattggaatgacttacacacccgaggagcctcttcgactggaaccaatcgaagtgagagacacaattgccactctcaggggtgtggcgaaagagtcgagaaaaccgcccagggcgaatggtatgtatgtatgagtgtgttccgtgcaacctgtacaacggtacaacggcacaacggtacaacaggtaccataggtacctatgtatcatatacctcggaagggccgaatgagccctgggtccaacggcctttggaaccgtaagaggaaggcaataggaggagctctggatacacactcctactatcatgattcgtagatgttccaatgggatgtttcacttctttgaaacgtagatattggggatacaatgttgtatattgcagtatttcgagttccagcccagtccagaggtaagagcgacatcgtgttgctgtacagtgggacagagcgtacataattggctcatcctgcccatggtaggacctcgcatacatatgtatgtacctcgacaaggcgattatgtactttgtatgaggtagtattgactgccgtttcagagtatatgccacggaaacgtacgtaccgttgggtgggggtcaatggagcttgatgatcctgtaaaaaaaggaagaacatgaatctggacatccagcaagagggaaacttcttccatgggaattgagccaattggaaaaagaaaaatgacgacagaagaagaagctaaagggacaaaaaggaagtgaagtcggatccacccggtttgaccaccgggatcgcatcccagccaatcagagcgggctattcgagactacatacatatcccctaaacaagagatagcagagaatggtactttgtagagtaacggaatacggggataagagcttatttatgtacatatatagtacaatgtatatagatatatcgtatatacactcagggtatgttataatttggctcattggacctatacccgcggactctttctccaaatcaactgaccagtcacttgagctgttcttaactgggtcatgtgactcaccagctctagtggagtactccaattgggttgtataacccggagatttcccgaaaacgggcattgacagtctctaatctagagaataaaagtacaattcaacttcgatcgaaggatgatactgacgacagtggagggtcactgacgcagctttgatgtaatggcacccatcttccaaaaaggtactccggcgtgttccagtagatataccatgttttgatgaagaaacaagccacgtccggacggttagggaattggcgatcagctcaaagactggacgccacattgacacctgaggcgtcactatggatttctgacgtcatgggcgttctccccacatctccatgctttctatactgatctatgagaatcataagcccttctgtccatggacgccatacaggggctttcaactgggaatcattcatcgtacgtatacaccaacacccgccagtcagacttgaccgtcaaggccgtgtcaagagagcgagttgacccattctataatatccataacgcgttatctattattagtggctttgtggctgtgctcctcccactacaaaaaaaaaacacgacgagcccaatcacggcagggatcagcagggatctgagtagggcgtctccattccccatccttcatattgtgattgaccgagagcgaattgttgcaatgtatcgactcttcacagccaccacatctccacctccacatctccatatatccatatatccatatatccgtctcgatttggatgtagtgaaaagtaggtgcttacacttccgtgtagaaaattgcaggtcttaccttcctcgggcacttctagtcgccacagccccacggatgtgcagtttcaactctatgatcgagatttcgtcagctgctggcggtcaaagtgtggaggcgatggttggtgttgccactgttaggtaactggtttctgcatgaccaggattgatcactgtgatatgtagtagatccgaccgaggtttccaaagctcgaaaagtacaagtctcccagaatggagagacgaaactacacatgataaaatagaatgatcaaaacgcagggcaaaggcaacagacccgactcatatttgaatttgtcttagaagacaataatgtgtgaaagtggtacgcaaccatccaaaagcaggattgagctgctagtatcaagaactgacatgaagaagtgaaaaagaagagaaagaaaccaccgcctggccctcatagaaccaaagggcgaaaaataaatatcctgaccatcaaaaaacggaaacaaagagcggcaggaaaatcaaaaaaaagtcatcatcagaggggaattttcatgcggaatctcattaaacactgatataattacgattacgggcggcgcggctgatgtgctagacggggagggtatagacaagatgaagcgcggggaggagccctttatcgatcaattccaagtgaagccacttttcccgcaaagcgagcgccagcgcttcctcttttggagagcttctctctgtctttgtctctgctgtctgtgacagttgaagcgtttgacgaagaggaagactccttgctgcggatagttgggagagagcccagggtatcgtttgcgtaggactttccacctagcggcggtggaggcacgctgaaggcagatgtgcgggcggtccgttggctgagatacagcttggctgcgggggagagaggaatggaaggaggttgtggcgggatctcagcgccgttttggactaacagctcggcgatagggaatgggatggcttttgcgctagatctcgcggcaagagtggttggtggggcgcctggggacgcaggatcggctgcggcaagggctaggaaggttgcgtgagtgttgcgggagcgatcggttatatttacgttgccacccagggcgagaccgtagaggacgccttggatgtcgttctgtttgattgacgcgaggagcgtttcgtcggccgtcgcgaagcgagaacgtggtgaaggcagattctcaacgtaggctcgatcaacatatttggcggtgatgaatttcaaccgttgctctcgtgtagaactggcgctcggcttgagagtttgatccaaggtcgcctcccaaatcatgttgctaacgcggttgccaatctgcaggagaatctcgacgatatcattcgagaaggaatgtacatccaatgtgagagagcgaatcttggatatatgcgtgcccagagagcggtggattccactacattcaatgcagagaatgattccaaggttgatggagacccattcaactttggatgatgatccgcaatcagcacaccagttgttgccttgatccgcatcccgtacaacctgcagaagctttgcaggattctcttcaaagttgctatcaggacggacatagcttgggcgcgcaccgacggttgttcggcggatgacgccagcgttgctggctgagctagaggaggaatgggagtggtgaccagacacagacgagcttttccctgttagggcggaaccaatatcccgactggtaggtctatcattcctagatgcggagggaggcggagtctcctggccttcaaccgcactctgcagcgcgttgttgatagccctgatccaattggacatgtcgtcctcggatgtcgcttggtaaatacgtttgaactggggtgtgatcacttcgaaacagaaccgtcgttccgcgtttcgagcttcacggactgatgccatgcgcagatcgatggggtccatgtgtagatccagcttttgtttccagttgctatactcggataatttcccttgatccaaaacaatccaaaatctgataaaattagaagttgtacaaccattcctgcgcttgtacttacttgtgccatgcttgcttgttgatacccttcggatcgatgtgagatcctggacgtgacagtgcccacaaaaggccttctttgcgctgttggctacttgtccgatcagatccgctgttgtgctcctcgagatcccggatacccttgaagcgattctggcccacattagcagccaccgtcgagtttgacgcgggtgcactgattcctgtagctggtgcggccggtcctgcatttgcttgagacgaaatcgatgaggtgttgctaatgactcctcgaagctgagagcctgtgctatcagccctaccaagctccacctcggtagaagggccgctattggcagtcccaggagggataggaggcacactagttgtaccaaccactacgtcgggctcaagatatgggttactgccattctccagagcccggcgcttctcttcgcgctctgtgcgctggaattggaactccttgtcggcctggtccacctcgtgaataagagcttccagctgaggggtcattccttcaacctttttggcggctgacaggaaattcttggcctggcaactcgcatatttggtgagatgtgagagaacctcttgctctttgcgacctccatggagatcttgcataaaggaggagtaatcaaatcgcctcagttcgaaatttcgccgcttggcttgatacttcgaatcgctctcggcacgcttcttctctttcagcgaatcctgtcgctggcccaaataccgactgacataagcgtaatagtcgcggctctcttcatcccagtccttctttttggcttctgcttgcttaatatcgttgttgtatagtttgaccagaggatcaatcaccagtttctgaagttgcaccgtgttgagctgctcgtagttcagaatttgccgagcaattttctcgaagtaatgatctaacgcgggctgaatagcatttgcattagacgtagacgcatcattcaatgacgttaggaactgttccatggcctcattgcaattggcttgcgctagctgcgcgctctcggctttcttgagcaccttcttgattttggttcgcatgttgcttgtcttcgactctagcgctttcatagtcgcccggaacaatggtccatcctccactccgctcatctcatcacctgcccgcgaatgtgggagatctaccttggctggtggtgggggaggaggcgcggacggcgggggaggaggtgggagagacttctccactggctcaggtggagtgatggatggattaacggtcgattcggcatcgctatagtgagatataacggattgagtcgatgaaatccgagagcgcggaaagacgggtaactccaggtgtggcgatgagatctgagggctcggcggaggacgcaaggagttgtgcacccagaaggaaaaatgggcgagagtgttaaggcggtttgttctttgatcgtaatccaagaagctgcagctgttgcgccaaccgccacctttgtcctctgttaccttcggaggcttccatcgccatgaccattcgaacgacacggacggggtacccccagtggagtaatctccaatcagttgaacattagagttattctgaaggttagggttcgcatggaactctcttgtgatcagattatccagttccttcgagttggatgcgtgagcgaacgtgagtcccgtgagactagtgtctgccacctcgggcatagtcgttgaaacaccgttgacagagtttggagcattgccagtcttcatctgacgaatgataaaggtaaacttgaagatcagctcctcgtcgttcgacaggcgtagcatgaaggtcgggatcggagcggtggagggggtgtcggggtcctgttcggtttgaggggacttgttagctagaagacccgatacatgatattaggtaccgcgtacctgaatatattcgatcggagtatcgtcgccagcatcgcgcttggctacgaaccttgccgccgggaacgcgttgggggatagagtcaaaagacgacgtcgtgagttgcttatcgtgaccgatgcgatcgcgactattgaaatttcatcagcatatcgacaagaggttcagatccggtattttaacccacaacgattctgatccttgaaaaacaagttccccgcatcgtcaaggcgggtggcaacattccccatgatggcaaagggatcaggtcacggcgcgagaaagggaccgaagtagcgggaccaatcgttggccatcgacggtctgcgaacctgtagtcggatggcctttgtattgaagtgtgcgaaggaaccgagtaatcattcagtgaaggtgtctaggggatgggagagagggcgagctcaaagatctgaaggaggggcgaaagttgatcggataaatgcgcaggcacccgaccccatatagtgccatttagtgtgaagcttctttttatttaaatattcttatttggtttcagttatatagttcgatttgtatctgttatatatcatttaatcatctgttggtttggacttgttcaagggcattatttaacaagaacatctaatgcgactacatccatataactagatataacacgactatagcctcacttctgactcaaaatgctataaatataggccaaacttatattaataggatcaactgtacaaatcaagaaaaacaacctggtatgaaaaattaatcgtgaacgtcgtgagactcggttccaaacccgagacccgggaatagaaaagaagagaagaatagaaaacaaaaaaatcagggcatcagctcgcgacttcgcttgtcccatgattgggttcagtgggaatcgcaccagtcgaagcagggcggcgctcacggccagagaagtaccgatgcttgtgcttatggccatcgggcttttcatccgcttctacccaccgcattacctgtcctcgtagatcgcgcatctcgtggactcgtctagaaagatctcctcgtttcttagattgaccactgcgctcattgagctcatcctcttccgagctggagattgacagtgaagacgcgctgctctgctgcaggaacgtgatgacatttcctgcggtcttcttgaattcgcgctgctcgttcttcagattttccattcgttccgcatccgcctggcaatccagagtggtaacgtggagtccggggaagttggaggacataaattcctgtaagagtggtagtttctcgccgttgggacggtaagttccactgtcgttatcaataaagagttcataatcccctggattggttgagatagtgatcccttcttcggtttggcccaggtcctcgccctcgttgtggtgctcatcttcctccacaggaaactcgtctgtaggcaccgtgctcgattctgcgttctctgcattacctgcattccctgcacgttcttcattctccgcatattctgcattctctgcgcgctcggcacgcccttctggggagttacggcgatggcgatgcttgcgccgccgaacgaagaattcacccgaatacgcgatgtagatagacacgtcactgtgcatggtgtgcttactcagcatatcaatgccaaattctttaccggtctcggtgaatcggatttgtccgtccaaggtgagcacataggtgaagatccgtccaccctggccatagtgcgcaaactccaaaaatttctgagagagttcacggcaaggcctttgaaaggacccatacaaggtagtacgatcgaaattgtagatgcgctggtgctgatgatggagtgttttatgcaggatacgccctcgtagactttgtgcctggaacattcccgccacgaagggcctgaactctacatagcgatggtatagctctgcaggtacagggcctgtgagttgcatctcaatagcctggaaactattcggagtcagtatatagatggcccaggggggaagggaaggaagacacacttgtaacgggtaatcgacttgccactgccatctgtgctttgaacatggtctttgatgccagccagtcgtccaatcagaggagaaaaatgtttgaaccaaaagttaggaccgatagtgtacatatgacccccctctgtgccgggggtttttccgagacattcgatgctgaccaccaaccaggactccttacggtgaccagtcgcaaacgcggagacattagtaaatacgtagacgcgcttgctcccaaagcgctttttaaccttgaaggacttctccttgaaacctgcccagtcgtctgaaagtgcaggaacgtcgataaaagcaatccccagcttatcgtcgtgatccgtgggatcctcgtccatgagatgacatttcaactgaaatcccgaagccggaacatttgcgatgatccagtcgcattcccacatggggtttatgtccctgcgtacggtcggagtgcggaaatgcacgtcggggtcttgtttgtggcgcgtcggtaggtcgactaccatatgcgcgtcgacataaggatcggaggagaaactgccaaagtccgcgacgggcaggtcttccgcgcgatggaaagtgatcttgagggtgtagcctggcggggcgtggggaaacggagtgggatcatagcctccggcaggctttgactcttcattcgtagtgagccggcgatgtatcttgtcagccttctcgactagtttggggccaaatttgtcgacgggatggacaggcaatggctggggttgggagtcatccatggtgagtatagggggggaaacaaacgtgggaaatctcttcccagagataaagataagtaaacctgaataatagtcatggaagagggaagggaagaagagagtggagagtccaagctttttcagccttacaaaatgaagaaccgtgtgagttccctcaagtctcccctaagggccccccaataaggaaagatgagcgcaaggcaacagagattataccgccaagcccttgccaagacctgcctagcggcaccggataacgtcattgggctttgtctggttcccgcgccttcttttcagggggtcccgaggtcagccctatattatgttgatgttgtgcatgtttacatatttatcttctctatcaagtaacttgaaatacattaaaggcaaaaaaaaagtaagatacccagaataagctagaacacatcataatcgtacacataccgaaataagaataagataataggcattaggtcatgagtatcatgggggaaaagacaactccttgcgcgaggactgacgaatgtggcgtataaagaaaatggtttctctaagttcctcggaagaggaattgcatgtcctccggggtcagtttttccaatgccgccgcttgatctttattcagggtaccccggatgaggttggccttcttctcttgaagttgaatgattcgggactcgacagagtcctcgatacagagacgagtgaccacacaaggccgctgctggccaattcggtgactgcgatcggcgctttgccattctgccgcgggattccaccatgggtcgataataaaaactcgggaggcttccgtgaggttaagtgccacgccaccggccttgagagagactaagaaaacctcaacctcgggtttagtcatgaaatgttcaatggacttttgccgctgtgctggggtcatcgatccatccagcatcacggtgttgaatccggcatggcgtagccgccattccaccagttgtagcatggatgtgaactgggagaagatgatagatttaggggtgtgacttttgcttcgctccttgaaaagttcataaaggagcatctcgattttggtggaagaggtccagctctccatggagatgcggttgatgatggaattcttcttgacagactcttcgtattcggcaagggtaggttgttccaaatcgatggaaagggcaatatggcaccgtgggcagtcaacatgcttgctatcgtcctggaatgactgaatgtagtccttggcacattgacgacagaattcatgacggcactgagaccgaatgccatcttctgcgggctcgtcacagatacagcatacagcaacgttgaaccctaattgcgcttttttcttcagaatgagatcgggatggtttgcaacttggcgcatctgcatgatcaacccgaagatgttggcatagttattcaacatgacaccctcgctgacataggtgtcgaattttcttgtcgagttcgtcataatgctgcgtgagaaatcttgttcgatctcaccgaaaaattcattgtgtaacatgatacgtttaggtgggagctccatcgacgttgtatgctgttgcttcatccggcgaagcatgatatgatcggtgatgagacggagcttttcgagaccctctttacgttgccgctgagttttcccttcaataattgggttaagaatctccttgttgaagatcgaaatatgcataaacccagtgtgagagcactcagtacaacgcccctctttagtcgaggtccactggagttgttcgcaatcgcactgcttacaaaagtagcatgcaaatggcttgacttgtagaaatcgcagaagggagaagaattctccaatccggttctgtacgggtgtgcccgataggcaccacttgtaattggcctccaaggcaaaacatgccctagcaacacccgtggtacgtgatttgatactatgcgcctcgtcaaggatgaggcggtgatagtggactgcgtggatgacactgtctgctttgaccatcgttgcaccgcgagagaagcctttctcctgcttgcggtaaatggattcgagacttgcgtaggaaatcatgatgacatcgtacttacgaatctcagccggcgtcaactttttgattttcgcgtccgagttgtggtagaccaagaccttcagcttgccatccgtgtattccttgatctcggatacccactgcatcaaagcgaccggtgggacgagaacgagggtcgggtcagactgggggaaatcggacatgatgagtgaaactgcttgaatagtctttcccatgcccatctcatcgcccaacaaaccacccctgtattcagtcttttcctgagctatcatccagttcaagccctctagttggaatggcttgagtttgcgagttatagagacaggttgcttggcttcctttggctggatgataggctgtgctttgagcacatcccacatggtaccaactgtgggatgcctgtacacaaggttctttcggtctttttctacctaggggatggttagtcatggaaggcacgtgggaaaagaaccctcggcttacacggcgagctttccgctgctcttcccagctcgggggcagatctgcttcagagtcgtgcagatcgtcatcgagaccgtcctcaagaggatcttctgatgtatccgaagaagcaacgccagaatgaagtaacccaggtggctcagggctcaacggagagaaggacactggtctagaatctgggtccgagtcgtattccaagtgttcatcaacgaatttgtctacgagcgaaccttgttctgttgtcgggcgcgggtagtcgtattcctccatttgaagggcatgagccagagccgcatcagaagtctcaagatcattttggacagacagagtacccataggccgttttaccgccctttttttggaggcatgagttagtgaaacatcggaggcaccagtatcctccgccagtgccgctgcggatcgttttcttcctccttgggaagctccaagggatagtgcgctcgactgtagtttctttacgcgatcagcggcattgatacgcgccgaagtctttatcgcaaccttggtgtcaggttcagtaactgcagcaccaacgctagtagccggggtactgcagcccgtggtcagattccccagcgaactccgggaattggagtcactgggcgattcatttttcatgggtaccaccacctcaatcctgcccgaagcagaattacccggtgtcaccgaatccacgacatagtcgtcctcatctgcctcggaatcttggatgacgcgagggcgagaacgagaaagggatgacccaccagctcgcagaggtgccgatcgacttgatcgacggaggggggatgaatttcttggtgacgtctcgctgaactgtgaatcatcatctgaatcagggattgtggttctgggtctcagattgtgcctcatattggaaccaagcgaatataaagagggcggtaatgagactagaggctggaaccgggcgtgggatctcagctataacgacagatctcattagccgcgttcaaaatatatagggaagtgacatgggggatgtacctagaaaagcgcgactttgcttgcttgtggtacgaatgtgatcagtcgctagacgacaggagatgggataaaagctggtataagccgcaaattagagaggtaaataaataaatgagagatcaaaggaaacaaaggaggaggatgagaagatggaaagaaaatgaaaggaggatgcagtcgggaggcagcaggtgcctgaaccagagaaatattttcctcggaatcttccgatgtccctttcagttccttttcttcttttctttcttggtggcaaatcatcatctccaaattcatcaagtatcaaaggtctctacatctctcttcttccgcataattccctcctattcccctgtcttccccatcgcccaattcttatctcagataagaccgcgttaagtgaaacgcgaaattgccacgggtccagtgactcgggcccagaccgacttggagcctcactttacaacctccaaatatgtgagtagtgctatcctttgtgatattatccaaactgacaagtcaaaaaggacaggaaggagacaggcaaggcggacaagagagccaaaccagcctcagggcattcggggcccgtatgttttgcttcccataaccttatccccccccagagactcactgcacacactagacgctctgccttgaccgactatcttgctgtatgttgatgttctcctacatattatgacttggctgactggttgtagtcaaataatatctcagcccaacaaattcgtgatgattgggaccgccggcaagccgaggcgcagcgccagcctgatcaagctgaacaagaatcatccaatgcagctgaagaatctaggtccccatcggtcttggagtcactagatgaccctataaaaaagcgcaagcgccagcaagctattgcaaggatcaaaaatagtaaggagtttgctaaacgcaaggctcgctttagtggcgattacgatgatgaggaagacgacgacttccttgcgctacagatccacgaagaaaagaaccggccgcaaccgggtcagcttgcaaactgtgaaatctgcgacaagcgtttcaccgtgactccctatagcaaggccggtccgaacggaggcctgctttgcgttgattgctctaagaagcaaaaggccgacgagaaaaaacccccggcaaagaagcgtgcccctggtattggacggcgtcagaatcaagctaatctacttgatgggttgacacctcatggaactcagagtctactggaaacctgcatcaaggtatgtacacagcattcaaattccagggaattgagcaaggagtgctaattgttccatagaaagtggcagattatatccatgatattgaggacttcggtgatttgcctccgtccttgctgttacggctcggtcagatcttgtctagaaggcgggccgtgacctcacgaaccttagatctattcttacgaccccagtacacatccatcgatttgttcgattgtgctagtaagtcagagttatttcctcttgtttgaacaaagaaagtctaaccagtggctagaactcggcacggatgattaccacaagatcctggcttccatgcctcgtctaacaagggtcaatcttcggtttaccacaccaatgaaggacccgatttttcactatatgatggagcgtaatatggagatcaaagatctccacctagatgggccaaaccttgtgaccgatgcctgttggcgccaacttttcatgaaacttggtcatcgtttcataagcctcaaactatggaacctggatgatgcatttgataacgaaaccgctcgagtgatgtgtcttcattgcccaaaccttcaaagactgaaattgaagttcttacacaaaatcgacaatgagatgcttgaggaaatttcgacgctcaagtcccttcatcatttgtcgctgcgctttctggctgagaccgacgttaagaccgagcctctcctaaaagtcatcagtagcattggacgtcagctggaaaccctatctctggaggaattcaacctcgtcgatgatcgactcctacagcatatccatgaacattgccgtcatatgaccaagcttcgtcttgctctcaactcgaccttcaccgataaaggtttagccgcgttattcacagactggtctaatccggcccttacctatgtggacttgaactccctccgagacgtggacatgacgaacccggccggcccggaagagcctattgggcttgcttccgacggcttcgtcgcgctcatggaacattcagggttgaagatccaacacttgaacatcgcctcgtgccgtcatatctcatacaaagcgttagagcaggtttttgcggaaggcaaaatgtatcccaacctcaaatatcttgatatttcctttagcactgccgtggacgactaccttgcacagtgtatcttccggtgctgtcccgcccttcagagactggttgtttttgcttgcttcaagattcgcgacgtccacatccccaggggacttgctctgatcggtaccgtgggagcgactatcaaaatcgacggaatcacccagagcgagacaatttgagcggcgctacggtggttcgacaatactatttttcctttttctctcatgtagtttggcgatattgcgatctgaatcaaaagtctttgaaaattttcaggcaaacttggttttctccctagaatcttgacaacttataaaataatctgattaatttatctcggaataatattagggacgttatatccaagatagcactgcaatagcttctacatgtctttttttcgtccctgaagctgtagccaagaagaatacgtgcggtgagaaacaactctttcatgtgtaatatatgatatgatgtatttatcaatgctcccgaggttgggacttgctaaatcattcatataaaggacatcattcgtttactatcatgtacatatacgccaaacaccatgatgtatgtaatcataacccatatatctcaagaaaatgcaaaccaattgacagaacccatgctctttatcccattctcttgccaatctcactctgccagtttcgagacctctcaaatccattggaggcggtctggtagtcgagcatcgcctggtaaacctcatcctgagtgttcagtacaaaaggtccatactgaacaaccttctggtccagtggctgaccagccacaaggaaaatgcgggcatccttctcggcgttatccgggacagagagttcaacaaagtcaccagtctgctcgaattgaacgtttgtgaattccttcacgatgcgagtggaatcattcgagccaaagacagtctcaccagccaaggtgtaagcaaatgagttccatccctgtggtaggggctgcgatatacgaccaccgggcttgatcgtgatatccaagatccagacaggggtgtaggccaagtcacgcacggagtcaacaccgtgcgactggcccgagatgaccttgatcttgacgcggccctcatcgactgtcgcgaggggaatctcctcagcgcgaagatcacggtaacgaggctcacagaatttcagcttctggggcagatcgacccacaactgcataccgacatttgggctaccgtcttcgttctcgtggggcatctcagcatgcatgataccgcggcctgcggtcatgaattgcagatcgccgggtccgatagttcccttgttaccggcaaagtcttcatggtcaacgccgccggacaacaaataggtgatggtctcttgaccgcggtgagggtggtctgggaagccagcgcccttaccgatcgtgaagtggtcaagcatgaggaagggactgaagttgcggagcttggcagttccgatagagcggcgcacacgggcacctgcgccttctgcttgctcgatggcaaggaatgcctgtcggatagcgcgagggacggacatgtctgtgatggggaagactgtgggcgtcggggtttccaggttcaggtggtggtttgtctgattgacaatgtttttggtctgaaggtgctctgacaggctaggagcttgttgctggataaatgagaccaaagagtccttgagagagtctttgatagaagggttataggcaaggaagattgctgtgatacaaattaaaagtggcagaagtagtttcatggatgagatgtggactatttatatgccaaagaagcgattgaaaagagaagaatgttctgctgggaaggaaaatgctgtcagcgttagtcaatctcataaatactctttgtagtatccatcctgggcatcgcaatgctttgcaagacatcagtcagcctggtccggccaatgagatggcgtggctttattaccaactttcccgtcagcagccgctaagcaaagagctagccagatgtggttagcgttggtacctgataaatgaggtactaatgctgagttcagcatttcaaatcaggtgaccttggaaattgggatctataagccatcagtaattctgtggatataagtatcgatatatgcgtgctagagacttccatacggagtgatttcatgagaaatattaaaatactcacttccttgcattctacaatatgtacatctgcttccaagtggtacaagcgttacgtcgggagcacatagattggtcgttatcagataaggccacgaagcagccgctctccaactgccaaacctgacatgcgaggaccgccttgtgggtaggcatttgattcattccagccttggaaaattgcttactcctgtctttatataattacactgatacccatatgcgattgatttacatgaaaaacccttaccattgccgaattgaagcttcttgcgacaagcgcctttcgcgaggaagcttcgggatacctgacttccacaacgcctagactccactgtcatccttggtccactgtgttctaatctgatctgttctaagagatgggtcactcagcaagcctggcgccgtggctggtattggcatgtgctgtgtctagcacgtgggcaaacaaaaaaccgttcaacattaatgacgatattctggcttatccccaggtaggttggatggatctgtcttgcacccatttaaagcaaacctaacgttggatattgcccatagtatcaagtgacattccccgaggagtatgtgcttgaatcccacgccgaagcattgctccgatccgaggccagccccggcgccaatgaccagaacaatccccaggtttacataggaaaggatagaacggactccaccgcccaacctgaggatacgaatgtatctctgttcacctacgaagagatgatactagagaaccggcgactcctctgccagatcccacgtgtcacgaacgacgaccataatacaacgagagacaaggaggatagcaaagccgaggagcaaaaggaactagctcgggcgacagatcgtggcctggaactcctacgtgaaatggaggggaaatgcatgtactatttctccggctggtggtcctattccttctgttatcagaagcagatcaagcagttccatgcgctccccgctggccgtggtatccccaactacccaccaatcgaagacactcagacgcattccttcgtcttgggaaagtttattggcgacaagggcgagggagagaaacaatccgcccagacagatgtggcagagcttcacacgcagggcggctcacggtacttggtccagcatctgcgtggcgggaccaagtgcgatcttacgggacgcgagcgcaaagttgaagtgcagtttcattgccacccacaatcgacagatcacatcggctggattaaggagctcaccacgtgctcttacctaatggtaatctatacccctcgtctatgtgatgacgtcgctttcctgccaccacggcaggatgaggtacacactatcgagtgtcgtgaaatcctgatgcctgacgaagtcaccgaatgggaagcaatcacagagtggtacatgaccaaccaagtagccgatgctgctgcggatgcggatgcggatgccgaccaagccagcctcccgattgtcggaggaatcgaagttggcggtcgtaagcttgttggcatggagggcaaggtaattgaaaagggacgggtggtatccgcaagcgaggagcgagtggaggtggtggtggttgcgaaacgcgagaatggcgaggtccgaaaaacgtccaagcaggtactgaaaaagtacgatatcgacccggagaaactggaagagatgaagaatctactggaagaaagagcagaaggcaaagactggacgctggaagttgttgaaagcaacggcgtgatcaagttccaaggcagctttgaagacgacgaggaagacactttgaacgacaagccttctccagagaaactggatgaaaacaaggtatctgaaagttcctctggccaaaagccaaagcaggaaacagagtcggtcgaaaagaagaagcagtcctcaaccaagcctgaaaacagcgagggtagcgaagagacctttaaagatgaactatgacatttatagtagatcttgtacattttgatgtcttattttttacaatcctcatatgaatgatattgtgtttattttctgcgattagctgaactaggaacattactagcctacctcggtttactataaatactcattctggacttcatgcgaaggtgcaaattttgtctaagagctaattcgtatcttacgtgatatatattacatgcaatccatttacttcagaggtactatccgagtgttttatgcttccaggtgtcgtgtataggtacatttatacatttaatagatgtttatacgcgtcctaattctcaagatttctactgtaggaagcgttctaatgttagatacaggcaatttgattacaacccacatacctccaaggctagtgtattaaccctatattaatcaaatatacagccgcagacgtacgtcagtagccttgcggagccgaggggcgctttggataaacaagtagtccggagtatcaaagaagtacaagacagataacagcaagaaaagaaaagaagaagaggaaagaaaagaaaaggcaaaagaattccactgaagagaatgaaaaaaccacatagttcactatagctcgaggcaacgtgactgtaacctccctatcgcctatggcccaccttcccgccctctccctctctcctaatccaacctcaccctcttctttcctttccccctctctcaatcccttgcgcctaacctttttctctacctccgcgcgccccgacatctgacccgtacccgcactaaggagcgccaaggctgaccgagcaacggacagcgtcactaattctaccggttcttcccctacatcactgcgaaacctagagctggcacgttgagacgctgccatttgcagcggactgccttcataattgatcgccgtaggaccacgagttgtttccaatatgggtttcatcggtgtatactcggctgtgtacgactaccagccacagggagcgggcgaactcgagattcacgagggcgacctcctctacattttggaaaagaatgcggatgatgcctggtggagggctaaaaagaaggctagtcgggaggatgaggacgaacctgaaggcctagttcccaacaactatgtcgaagaggtgagtctccgccgatggcacccgcgcaggcctcgctgcatggacaattgctgatattatatgaaacaggtgcaaccagcgcacagagctacagccctcttcgactatacgcgacagaccgacgaggagatttccttctcagaagatgctgagctgatggtgtatgacacctcggatccagactggacgttggttggagccaactcggagtatgggtttgcgccgtcgaattacatcgaaatcatcgaggatacctccgctgaaactactccccctcctcaaccttctgttcgagccgagcctgccgcgccgacgcttccgcagcggccgacgcagactgcatcggaagaaaccgaggcatcccccgccgcctctccggttgatatgtctcacaaccccgctgctgctgcgatcgccagcatcatccataagcagcatgcccctgcgagggtatctgccgagacgaccagagatgaacccccgccacccagtcttcccgtccgaccatcgtacgatcaagaagaggaccacgaggagtctccgccgcctagtctgccacgtcgaccaccttcggaacatgcgtcccccactatgaaccgttactcgcctgacccaactccgccacgtccccagcaggcggcgcctgccatgggtcgtgatcggacacatgtcaaagcatcacccccttacaaccgggcaggtgagatgacgcctcggtccccttccggctatcatatctacaatatcaatgagatggttgaagtgatgggcaagagaaagaagatgccgacgacattgggaatcaacatggctactggaatcatctttatctctcctgaaggcgatgatcggcagaaagaatggagtgcagagaagctcactcattactcgatcgaaggcaagcatgtctttgttgaccttgtcagacctagcaaaagtatcgatttccatgcaggtgccaaagacactgcccacgagattgcagcggcactcggcgagatcgccggtgcctaccgggcagaaggactgcgtgaggtgatcgaggcaggagaagggggcggtcccaagaagggccagatcctgtatgactttatggcgcaaggtgatgatgaagttacagtagctgtgggggacgaggtcatcatccttgatgatactaagtctgaagagtggtggatggtgcggcgattgaagaacaacaaggagggtgttgtccctagtagctatgttgaagtcataggattgataccgaaggcgcctttgatgcctcatgaaccaggtttgtcgagtgtggaaaagaaccggatggaggagatgcggctgtccaaacttgcgatcggcaagtcacggacggactccatggattcatcggaccgtcacagcaagcgcgacagcaaaatcaagtcgaagcccgatatgactaaggtgcgaaggtggacggatcggaccaaggatttcacagtggaagcccagttcataggcctccaggatggtaaaatccagcttcacaaggtgaacggtatcaagattgccgtccctgtctcaaagatgtcagttgaagatctcgagcatgtggagaaagttgccggcgtctcgctagatgaggacaaacctctttcaagcatccgacctcgcgttaccattggcaatgattccaaagctggggcttctgtgcaacgttccgattacgattggtttgacttcttccttaaggctggcgttgggccacatcgctgtgagcgatacgcacagtcatttaacaaggacgcgatggacgaatctgtgctgccggacattacatctgaaatccttcagactctgggtctaaaccagggtgataccttgcgagtaatgaaggttttggatgccaaatatggccgtgccccggacaagaccaagcttcgaaatgtcagtttcggtggtgaggaagtcattggcaatggcgaggacggagggcaaggtggtctgttttccgggcccggtggtgtgctgcgcaacaacactcgcagggccagaccaacaccaaacgttccagccggagaggtcgatcccaaggcgttcgggcagggagaggaacctaaatcatcagacagctcggcaagcccaccacctgcagcagctgaaaagcctgcagccggatttgaagatgatgcttgggaggtgaagcagccgaagcaacctgctgggccacctgcagccaccccgacgccaccgcctgcggcagctcaggttcctcagccaacaggggcaatggcggatctgactttgcttcaagctcctttgcagccgacgccggctcagcctactgcaccagctgccccgcctatacccaccctgcagccgcaggccactgccgtgcaatcaccagctatacaggctcaacaaacaggtgccactcctagcttgtttgcgcaagtggcacagataggacagtatcaacgatctttcagccctcaacagaccgggttccaagcacaggccagacaacgcccacaggcccctccgacagttgggcataattcacttctgcctccgcccccgcaacgcccactgtccgcgcctcagaacttctcgcaactgcaaaactcctttggccctcctccattgcaagctcaactgacgggccttccccaggcgggtcctccggttgctcctcctggccagagtctgaccgaaataaaccagctacgttaccaagccgcgatgcagccgcaagcgacaggatttatgggtcaacctcaatatcagaatggcttgatgccgcagcccaccgggtttactccccagtcacaattcggtatccagcaacagcaacagcaactgccgtttggtagccagatggcccctcaacaaactggattccagggacttgggccacagcccacaggctttggtggatatgggcaattccaacaaccaatgcagactggtatcaactctgtccttccccctgcactgcaaccgcaacccactggtgtcaatggctacggcaaccagtcctacacatctccgcctcctgtgccgccaattccccagcaaccaacagcgacccccctgtcaccacagaagaccggaccggctccccccatcagatttggtgtcaagccagatggtcccaagaagcttgagccacaaccgactggactcagagccaacctttcgcaagctagtaagtttttcttaccattaaaggtggtaaacttgaacagaaactaactcaatttacagcccccaataatccgttcggcttctaaactgcttctgtgcttgcccatactagactggcgtatataattctggtttcctggcaatttcccctatattgcctcaagttttgctcatactgaggctaggatgttcttttcacatatcgcagtgtcctttcgaaccagtgcccttggaatcaacacgtgtacatatcatgaccctggtccccgttttgacgcagcgcgtatcgaagctcatgccacgaatcctcttcgtccttttcccttgcaaaacccccgcacttagcgagctatccatattcctttcctgtgctctgacaggtctgattaggcctctcatatcctgcatttttctttgtctctagcttattgtcatataaatctgcctatggtgatgcttattgtatggatgccctctctttctcccttttctttgtctggatggttacccttttcgctctcgttctctccctttctaccggctcatacataatccatggagtcgttggcatttgcttagtctacgtactccatgagtaaactttctatgcaccgctacccagatcaaactggtacctgtaatatgaacatatatcatcacgcaaaatacatagtgcagttcctttcatgtctcagcttcagaaacgtatagtgttgacatccaatttagttcggtgcactctaacctgaccaatgccacataaattctgttatgtacagattcatgcagaaataaatcgattcgcccttgggggtatatatatcaacacgtccgaccatacaaaaaagttataagagagcatcataatccccgaaacaatagggagatctgtactagtacacccgcttttcatcgcatcctctaattcgttttccgacatgcactgggtaatcatggctcatctccccagatgccaaagactggaagatcctcagccatatacagcagaccgttatccgggaacatcacgtcagaaagtggagatgggccagacgctgggatcgggccggaaggaatagtcccgccaggagagcagccgaccgggatgcccgaggtagttaacgcagaaatggctgcatcataagacaaagctgcggtggggtctgcgccattgcacagggcttcccaaacatcgttgtcggttgagagttggggttgagggagtggttgggagggtatgtaggaggatggacttccaacgggcattttgtcaggagatttaggggataatgcagttgcagatgcagatgagtgagcagcacttggctcagtgaaaggtggggctcctggggtcggggagttgcgatcctcgtcaccgcctacttggccgaagagctggtcgacctgtttgctgcgcctattcatccattgtcgatttcggcgggaaacgtattcggttacagcagcgcggaggtatttgataatttggaagaaacggcatgcatgtggatcgtgcggaacaaatagccctagaaaccgttcggctttgttcattccttcttccaaggggagaagattatcgtagtcggcgaagaatgcagcgccgagaacgatgacagagttaaaaacggagttgatcaagaagggtagtcgacgtggaagggatgcgtaatggcagagatcatcgaccacgtctagacctcggagtgcggaatagacacatgcatcggcaaacaatgatattcgagagctaccgtttcgagtttcgggggccaaatcgagtttgcccttgacatactgggcaacacgatatattaggaatggccgtgtcaacaggataatcgaccagtaataggacccgaatacatgagctgcggctaagctgttttccatggatttgtgttcgagccgctcagtctgcattttgaggattgctggcagagtgcgaacccaagcccgatgctggttcgatatcatctctgcaacattgatcgagatgacttgcttcatgtatacatcggtcaagatccgttcgaatattcgacaaagcgagatcaccgcagctgaaagctgttggtctacagtcaaatggtgctgtgattcgcctgatataagagcatcttcccgtatgtcatagtcgtaatctgaagttgcgggagggcgtcccagggaggcgctgagaaatagatccatcatacgaagactcttccaaacgcgctcccttgctcggcgctcacgcccacaaaagagcgcatttgcatccttgcggtggattcctaccgcgtatgcagcacgcagagcaattcccagattcatgaatgcaccattgcgcctgcatgcgccgagcatatacatggaaaccaaaacgtatgattgaatggtggatatgcttggggtttcctgaaaggccgagaacgccaactgacggccgctgccaaaatattgctcagctactgtctgatcaatatcggaaacctgagctccaatggcaaggacaagatagaaaatcgagctaacggtatcttcgtcacccgatgggtttgcaacccaattagctagccgtggatgaaattcctccagatcaaataagtcaagcaacgggcttgtagcaagcacaaactgacgagctagtcgttgggcttcgtgattgcttggtggcgcaactagagctccggactgagtgcttgggttgccctgaaaggcctcgagcattgagtgtcgcgagttgtcctcggtaaactcacatcggccaatggaagacgtaacaacacggcgcagactctgtaagaacgacaaactcgccgaatcaccaatatacataaactttccctgcccatcgcgcagaagtcgcgccacctttggcacgggagccgtcccttccttctcatctttttcctggcgttccatattcattccttggttctcgagagagttcaaaaggcggtccattgccgtttccctctgcggagatgctaccatgcgctcactgagcaacattgtcgaatccttggcgtccggcttgagtaggcgggcaggccggtccgagaaatggcattccgactccttgtgcctttgaacacagattgtacatggttgttccccgttgcatttttgctttcgccttttacagctgtcgcaggctcgtcggcatcggaggcgtgctcccggggtagtgctggcccgaggcatccctatcgccgcgctcgcgtttggtgaataggtcgggtcactcgtccaggatttcagtggtaatcatcgaggcgtgagatatatatgaaccgattaagtcgggaacgatctatattgattcaagtcattgttgaggcttaatgaagtgctaagcctgttaagtgcggccgtctgctttccccggactccaccatctgactaagcagattcatcccacctgggcaagatgccccaggtctgtacatacggagtagatgaacttggaatcaaaatctcacatgatgtattggtgcattgatatgacaatacatttacttcaagcttacttctccagaagatcacggccggaacgatactatcttgccccaggtgtcggcagtgccccaaatgccagtccgcaggcattctaactgcacaatctggctgtgatccacaaacaggttgacatcaataccaaactcacgaacgtaccaattaaaggccttgggatctgcagcttcaaacatgatatgctcaggaggaagctccttcatgatcttcgacaccacatcagtccgccaggaggtgacgttttcagtgataccttctgactcaatcatcaaccgcttcacaccagcgttgaggaatctacgacccaagtttactaatttgccggggtcagaggtcccaatcgattcaagtcctgaggcaggtgtgtctccgccggctccgaattgaatccccaattcaggcttcggttccaacttgtatgagtggactttatcaataagtcggagccagtcatcctccgggaatgacagaaaaccggaagacaattcgatgacatcgaatctatgttgactagtcagattttatattccaggctcctgggcctcgagctgaggatgcacgtacccgagatccttgcattttttcagatagcggtcaaacaccgtatttggatcgggatgtgtgaggagatgctcagcccatccaccctaaaaccggtgtcaaatgcgccaatttgctggtctaagacagtcttaccgttgagacgtacacgccgtgctcatgggcaagatcgaccaattcccgcagtggcgtctcgtgaaaaagagtaaaagcacctgggttggtgtttatctcagcgctctcgtttctggcgacagccgaagccctgctgggactcacctccggcaaacttcagaccatctacgtgatcgcccatcctatcagctgttgtcagatgccatttggttacgtaggtggggacatttcgaaatattacgtttcgagaatatccgcgagatatcttttacccatgacctagtttaggttagctccacagaaaacgatgatagggctatatggtacccactgagtagtatgggcctcggatctccgtgactcccttcgttctaggcttggcaggtctagggtttgaccgcacgaagccaaagccattttgcttgtcttgcagaagagtgatgccttgatatattttcggggtgacagaaaagtgtctagatggggtcgacagagcaattgaagtgcgactcattatacgcccggttacaagtggattaacaaacatatttaggcagttactggactagttgagctatccacatgagaaatcatgtatattgggagtgtcgacgtcaaatatacttcatcgaatcaatgccaatgagattacgtagtatattacatcattttcgaaataccattacaatctacaatcatattgtattccttcaacatacggcgcacaacatatgaagttctatacaaccccggctcggataccggagactctgtaacgcgaagtgtttcggcgttcggcaagagcagacccgatcttgtacattttatccatccatgatgccaccgttgtagaaggtctttctcggatgacacaggtaccgaggtatatgccttgaagtaccactttatgaataactttatatacatgaggtcgttgtatatctccttgtgcacatctctatgcacatctctactccgtacaaccctagctatatccaatcaatgtcagggaatccccaaactacagtctctgtatccagccacgctcctcgccaagaacaaaagccagccttgtggactcagctttcacacatcgattcgatatagagagttatacccaaggaatagccaaaaaaaatatgcaattgattccggtgactcccgccctggccctggcacctgccttggacattcgccgattttcgaacacaactagatggccctgaagccaactctcctcctctattacctacataattcaaatcccctcattcttaaagtacttctttataggctgctagggacccttcttcttcttctttcaagtcgagagaacgactggtcccttggtctgatacccatcatgggagctggaatggtcatcgagcctttggtggttattgttctcttatttggaggcacctggattaaccgctctgtcggatcatcctcgactaaaagctacaaccgacggaactcgaacgaccttggacgagccgcttcatttgattctttggagtcgggttactcaagccaatcgacaaaggatggtctgctgagccctcgctcccactcaccacaagccccggaagacggatggcacaagcgacaagttggacttttagggttgaatttcgaggtatcctcgccgaatacgattgtattccaagacagtttgctcagtcgattgcttcggaagtttcctttcttggtggaatgttggtattgggctttggtttactgggtaggttgatttgctccttaacttaccatcggtcttggctaaaccaaactcacaatttgtatagacgtaccagctcggtcgtgcctttaccgccgtgactctcaaggatgacaccgttgatgtcgcgaggaggcatgcattgcaactaatcgtgatcgaggagaatctgggaatattctgggagaccttgatacagagacgcttccttcgccatcctcttgtcatgccttggatcaattggatgtactcgttcatacacattcctgggacaatcgcgtttctcgtttggctctattactatactaccgtgcggaatcggatcgacgaggctcagcccggaaagcccaagggagctatgagcgggtcgcctgcaggtcctcttctataccaggcgcgtcggcggactttggccgtgtgcaatctcctcgcattcgtggtgttcactctttggccttgcatgccacctcggttactgagtgatacagccgtggatggtgacgagggagatctagcccgcagttatgggttcgtggacacggtgcatggtatcaagggatcgggcagtgtgtggaccgaaaaccgcttctgtaaccaatatggcaagtgttgtctggaatcctctctatgaatccttggctaactgttaccagcggcgatgccttccttgcatttcggctactctttattgatcggcctcacactgatcacaatccctttgccgcagcaccaccggcacacaatcctgcgtactcggctgacccgtgccttaagactggagctcccgtcgtggcgccgcctcgtttgcgtcatactcggcttcctatatccgtttaccatccttgtagctattgttgccactgccaaccattttattctggatgctgtcgcaggagcgcttgtatgtgccttggggtggtattttaatggggtgctgctcaacctgttgccactggaagactacttcctttgccttgtccggatccataagcctgagccgtcacttctcgatgtccacgaggaggagtgtcccacgaccgaaagtgtttgagaacatggcatccgagtacacccatagttgattcgactttggattcagcgtctttgttttagaacttgataccctgtatgaaaccccaccagaccgcctggtctggtttataatctgtctacatgaacctcccttagttattgttacccagttctctctgtgggattgatgtctctcccgtacctaactttcgccaattagtatgtttatgcaagaaatattctttgcttcctagaagagaaatatgactattatctaaatagttcctttgtagacagtagagcataattatcaccgtacatacaaagacaatccgaatattacaaaaacttcatataatatctctctcaaatccaaaatagaaatacccctggaaaaaacatcagaccaggaaaggaggaatcgcatcatcttggtggggtttacttccatagaactttagatgcgtttaaatcaactcatttgattccatttgtccctcgtattcgctcacctcgttcaaatcagcagcccatccaatacttattatagtgtgctggatcacatattacacggttgtcacggtcgacacaatgacatgaggaggtacggagtcgcaagctccctggatgacccttgagttctgatctgctcgtgattacacacctctcgagagcattgaatacacacttgatacggtggcctacctcgatgtgtattgcgactctaccgctttagcgatttgcgattgcttgcaaacaataattgagcatagcaccgaggctgtcatagtgttgtggctataacaaaaggaacacgtcacattcccttacattgcggccaggttggtttgaatcaatgaatttgcagttaatttgaaaagaatctaacctgaagaacagattcatccacgtgcctatgccccgaatatcgcggtgatagctcgaagtatacatgtctcttggcacttgacagtatgtggtattatatgccagtgaatgaatgcgagaccagaagataacgaagacaaaagagcaaattgactctcgtatgtcaccaatcgttgctattgcgccgtgttgtccagatatcggtgattgtgaaggcatacagcaaagacgtccatcgactctttcggctactgtgtgctacaatttatcgatcttccagcgagacatcagaagaggagaccagaaagaataacggtcgttcctttggtttatgtcgaaaacttggaatatcagtctgcccacgatccgtgatatgcaatcccaccaagcgtcattacttccccttgatacctattaggagctgacatcgatactccattggcatcttggatgcatattcccatcgtgaagtgcttgtctattgaaaaccttcagagaggtaactatctagagacatttctacggagtacccctatgcgcgctgtgcaatgctcttccattgaccatccaaataccttgaaacatttgaaatccaaaaagcgaatcaatcaatcaccctcatcttctaatttaccgtctaagccttgttgtgtggtgacttgaaacttgtggcgtcattgcggtcttccgttctcagacgcgtcttgaagttcccgcgcctttcgcgactctctttcttctccacatctctcctaccctccctcccctggaagctcctcccaccacctatcccagtgccaatctacccaatcgccctgtgaattttcactcatctcattccagcttgccattatggctgacgatacccctgtctctgcgccccaaggcgagcagcccgagcgcgccactgagcaacccactgactctgagaacaagtctgaggatgtcaccttgtcggaagacaagcctgccggtaagcatagactgattgatatcaagttatcgttttgcgactccatttttcaacgctgtcccccggtcgggacatcctgtttctgtgcgacgccactaacccgctgtttcttccagagactgaagctgcgcccgacaagaagacggacgctgaagctgagcctgataagcctgcttcctctgatgaggctcctgaggccaaggccgatggcgaagccgccgaggctgcacctgccgatgtggaggccattgcgcccgcggaggccaacggaacccctgcctcagcgaagaaatcctccaagaatcgccggacctccactggtaccacccagaagctgagccgcaagaagtctcagagtcgcatcacccacctggacgctaagccaggccaaacctatcttgcccgccttcgcagttatgcgccctggcccgctatcatctgtgacgagggtattctgccatccagccttctcgaaactcgtcccgttactgccatgcaaaaggatggatcctacaagggcgagtatggtgacaatggcagacgcgcccatgagcgtaccttccccgtcatgttctttgataccaatgaattgtgagtcgaccatccgcgcagcctctacgccagacgcgaacttctactgacttattttttttgtacagcgcctgggttcccaacactaacctgactcctctcgaccctaccgagtgcaaaaatatttccgagaagaataaaaccaaatcactcatcaatgcctacaaggttgcatccgagggccacaaccttcagtatttcaagaagctgctgaacgaccaccaggcagctattgaccaggaagaggctgagttggaagctcaagaagcggagaaagaggctgccaaggccgcaaaggaggccaagaagggcaagcgtaagagcaagggcgctgagaccgatgttgaaatggaggacgcggatgactccaagaaatccaaggctccttccaagaagcgcaagaaggatgctgagaccgatgctgaggcggaaaaggtatgtgttacaatttcattgtgttgtgatctctcatctcacgaaattatagcctgctaagactcccaagtctaacacaaagctgaagttgaccacccccaaggctcctactgaggatactggcaagaagactcccgccagcaagaccaagaaagcacctgccaagaaggccaaggcagctcccgttgccagcgatgaaggagacagtgccgatgctaaggaatctgagaagccgattgacccagaggaactgagaaagaagaaggaaaaagagagtgagagatcccccatcttccccgacgagtctgatcaggccagcttataccttacagttttgttcctccgccacaaactccaaaaggggttcatttcccgcgaccaaccccccaaggaagatgaaatggctagcatggccggctactttgacaaattggaaaagcattcagacttggaggtctcgatcatccgttcgactaagattaacaaggtcctcaagatgattgtcaagctcaactcgattccccgggatgaggagttcaacttccgtcaccgtgccatgggcatcttgtctagctggaagaacatcttggacgcagacacccccggcccggcggacaaggatgagaagtcggccgttaacggagccaaggaggatggtgttgaaacccctaaattggagacagaagaggaaaaggagctcgagtctaagtcgaccaaggacgttgattccccaatgcctgacgcggatgagaaagcccctgagcccgagaaggaagaaaagcccgaggagaaggcagctgaggagcccaccgaggagaagtctgaggaaaagcccgcggaggctgctgcttgagtggtaggatcacgactctgcgatatctattttcttactcctatccatttgcgctctcattcaagttctcttctttgtttctgtttcaatctacgcggttccgccggttttgttttctttttcatcttttttgtcacctgccaatgcaatactgggatacggggctggaccaaccagcaaggcttctttgaatcaattgaaaatgtgattattgttttttttttaatcggcttctgcacattgacctgtgttctggccatggagtacaggagttacccggcctggatcttcccagaggttgcacgccaatgatcgcttcgatgtcgggctggttatgcaccaaatcgggcccagagtatcggagcgaatgctgttttatgtgcaaatgcacagaaagttccccaagggtacgtaatggagagactatgtcttattcactgcatgtattgagctcttgaatacaaggatccataatggcgttcagtaaatcagtaaatagtagaatgtatgttggtaagcctctttcgaaggtcaaagggcgtgtgcaattgggattattatgtctatagaatctctatttgaatggagtcaaggtatcgacgtatatgcccggctctctgcaaaatcaaaaatccccgcgccttctatatatgtatgcagttatacatcacgctgcttgaaaacaaatagaaaaacaaaatgccggttcgatggaatctccagatttcctgtcgaaatcactcatgcatcgacagcgatgacaaccacgacgcagatatcatcaactttcccgccgcggtaatagtcaccggggtagtagcgctgagcctccttagcaaagggcccatcacgacgatagtcgatactagcaatcttcgcctcgccagcaatcgtcgccgcgagaacagactgcaaggtgactccatcctcaggtccggactcggtgtgagccgggttcttggaaagcggcgagcctggcggagtcggaagagcaccagccaatccacccggcgcagcgagtgcacgcagattctccgagactccgacgccagactccgtagccgtccacgcgcccgtcagaaccatacggctcgtgacgagcttgagaatgtcctgattattgatattatcaaaaacaccatcggtagcaataatgagtacatccccattctgcatctgcacattcgtaacggacgcatcactagggaaatcctccaaaaacgccccgccaaagacagacgcctgggcgcgcatacgcggcgggatcacactaagctggtacggggtgttgaaaccatgcgtctgcggaatcgagtaatgatgcaccgcggccctcctcaacaacaccgagccagaatcacccaaattggccaactcgacccgtccatccggcaaggcgacgccaatagaggccgtactcccacctgcccggatcgtcgaatccgccaccacctggtcgtacccggcctgcaggaggtatttagagcgcaagcgctcggcgggctcgtgccaggtctgtgcggtgtgcgccatgtagttgcacaagccgtgggagaagtcggctgggtcgacgcgagattccgtccagccacctacgccatctgcgacgccgaaggcgactgcttcggcgtttgtttcttggtagtctgagatgcgatttccgatacggcttacgaagaaagcgtcttcgccggagtctgggcggttgcgacggcgactgacggagtttttgtcacttgaaacgcctatggcgtctgcggcagggtcgaaattgtatgcatttttgatggggtggaagcggcggcctttgccggaggaggagacggcgacgcggtaggaaagtttcgagggagagggtttctctaggtgggttgctagcgttgtgtggaaggctcgacgcgagggttgatgggttagattcaggctgaggtgagcatctggtctgactcctgcggcgtgagacgagaagcggacatgttgggttttgaacagcgaggaattgtatgcgttcggattggtggagattgaatatacgccatcgcggacgatggcttggaggctgctgcaggcggaactgcaggctcgacacgagacacttggcggaatcatcgccgatcgggggcttatatacagttccctcgtgaaggatagggctccaatttgggagcgagcgtataagacagaatccaaaaaactaaaaaaatcaaggagctgcatgaatctcaatggataagacagtacccgcccttatcgtctgaccgcctcgcgtcattagtttttcgttgatacctgattactcaggcagaaattgtctttgtttgggatcggacttgggattggaagaaacaagagaatctgttcaatgttattctcatatttagttgaatttaaatatttctacttccacgcgacgttcgtcaaattgcatgctcttcaacgctataccgccaaccaaagtttatcaatgattctgccgcccgcaacatcttgtctcccgccaaccttttcctctaccccaattcttttcttttactcaagcgcgagtctttattaatctgctttttgagccaccggagaagcataggcttctaagtcgcccaagatgatgcacccatcgcgacaagcttatgttgaggagacagaggatacagacatggggggcatcagctatgccgatcttcgtgagtagttctcgaaagcttcgatttgaagcttcctaataaaataatagccatggaccaagattacgatatgccctctacaccagggggtatcccaactgagcgcgcctccgccatcctatcgcaattcgaacggaaacgcagagcagcagcgatggtggtcccaacagatgacacacgagtgcgtgcgcgactacgggaactcggggagcccattaccttatttggcgagggaccatcagaacgacgcgatcgtctacgtgaatttttgaccgatatggcagagaaacaaggcggaggcgagatagaaatggaagaggccgaggaggaaggagaacaacaagaagaatttttcacagatggcgggcaagatttactcgaggcgcggaagaatattgcgctctattctttgccgcgcgcaaaggctcgagtggctcggctcaaggacgaatcaacaatcacacttcgaacacatgtcaagcatcgcaaagctgtcaaggaaaagctacaaggattcgatctttacgggtcgcagattgctggcgatcgtcctgttagcatttgtcgattcgcgccggatgggcagaccatcgctgctggaaactggagcggtgagatcaaattgctcagcgtgcccaatctggaagaaaaagcgaccttcaaggcgcatacggatcgagtgggcggcttgtcgtggcttcccggtgccactctacccggatcgaatgtctcaccttcaactgtcaatttgatctccggaggcggcgaaggaaatctccacctctgggctcttgatcaagaaaagccactggctacgttatctggccattcggcccgtgtatgccgtaccgagttccacccttcgggccgatacgcagcatcggcatccttcgacagttcatggcggctgtgggatatagaaacagcaactgagctgctcctgcaagaaggccattcgcgcgaggtatatacagtggctttcaacagtgatggctcccttgtggctagtggtggattcgacagcattgggcgtatctgggatctgcggacagggcgcaacgtgatgatcctcgacggtcacattcgggagatctacggtatggactggggagttgatggttaccgggtgctgtctggttccggtgacggcttggtcaaatgctgggacttgcgacagatgaaggagacgggcggtattggtgcgcataagagcgtggtgtcagatctccgctggtacaagggtgcagaggctgcgtcattcttgccttctaccgatggcgggatggacattgatggcgctgcaccggctgcagcggaagccccgtcgcccaagaaatccggcacattctttgtgagcagtggatttgataaaagtgtcaacatttttagtgcggatgactggtccctagtaaagtcgctgagcggccactcgggcaatgttcttagcacggatatcagtgacgatgcaaagtggattgctagcagcggccacgatcgaacggtgaagctttgggggattgaatgattcggggttatagcttgactattcccctgtctgatgcatcataattggaaatcgtacacaactcaaggaacaggctgtatgttacctattgaagaagacctatcattatctacatcgctttcctgtgtaattcgtagtcacgtgccaaatgcggggatgacgtaaagcggtatgccgagagctttttatcaactttgaagttatagcacttccgttgaccttcccttgactgtaaaaacactatatagtcatggctttccgtccacagaggattgcacggcatttctgtcgcacaaaaaccccacggcctttatcacgaccaacctcgttatcaaacacaagtcaagatgcatgcctcttctgccgatatcgccagccagcgcgaggactaacaaccctcccaacacgtggacctctcatagcccggacatccaagatacagcaccgctctgcctcaacagagactcccaccccagcagaaccaagcaaaaacacccttgccggcgcgccagacataaccaaccactacacgatcttccctcaaacgctaccagcaggcccgccaccagcctcggcgttcgcaattccaaccagcgaactccgccgcgaattcctccaactacaaggcctcgttcacccggacaagtaccccaacggagcggagaagcagcttgccgagggcctctcggcacggatcaatgaagcataccggacactcctggacccgctgcagcgggcacagtacattctacgggaatggcacgggatcgacgtgacggcggaagatgcgtcgactaagcatgcgcttgatgcggagacgctgatggaggttatggaggtgcaggagactattgaggaggtcggagggtctgctgatgcggaggcgcagatcaatacacttaagaaggagaatgaggcgagggttcttgagtgtgtggggagacttggggaggcgtttgagaaaggggatttggaggctgcgaggaaggagtgtattcgattgcggttttggtatagtgttggggaagggttgagggagtgggaaccggggaacacggagattcggttgatgcatactagttgatcggtggtttattttgtaaattattggatttgttttgatatatttggatagactacgctactctttttacatgtgacgtttttgacgtttggagaattgaatgtacaacaggcgttgttcgttgtatactcccaagggtgccaactatatttgtggattcacgatgggatggtgaaatacgcttgttcctggaatagagggggcgagggatatatttaacctgtaacagcggagccagaggtttcaaaatgtctatttttatagacatctgtaaatattttgtgaatctcgtcgttttttccaacctcggcataagattaggtagcgtttcagggcaccgttgtacaaccgttgaccgctacatccaacatgtccagaatctcgaggacaaagaaaaattcaaaccaagtgaagcttcaaattcaaaacgatggagcttgcaggagcaaatcaaccagtgaggcccgagattgggttctccgaaggctggggattgggcacaaacctgctgatgccaatgtcgcccaacaattggacaatgcatgatccagttaacatcggctgttctgtatggctgctctgtgtggctgctctgcgttgttttttgtgtcggtgatagcggcatcgcattcaaatggttcaaacggacgggtgggtggtggccattggcatccggggggggggaccaaatcatagtatatcgagagaacagtgtagggcgaacacataccacggcaacatcaaacctcttttggccccatctgcatatcgcatatcgcgagttagtcatttggtctagcgttaactagcacaatgggtcttggaaagggttcatgcccccatcacagctgcacacgtagcaggccactctcctcgcccgagatcgcttccagcgccttgggaattggagcgtaaaatatttaatggggctatcccgcatgttagaacgtagttttcttcatctcatcccttctgaagcggaaggtcaactgtcatggagtctgttcctaacttcaataggtatggagagcgcatctcagctatgatataggtatagactgttagcagaccgctaattcaacatcttcagaatcatccattcagcgtcattcaccttcctcgtcggcccacaacatacaaagctgacgatccagtcggggctcgcccaccatgtctctaaaccactggatcatctcatgaacggcccgacgagggaatcgaaacaccgaatcgccgttctggaagaagacgatgttgaaaccttcgttgctttctgcgagtatgcatacactggcaattatagcgtgcctcgtcctgaggtccaggaagatcacagacttggagtagtcgagagctcgacaattaccaactggagagggaattatcggtctgattcaatgtcgtcgattgtgccacccccggctccatcgccacctccgcaatttcgccatcggagacaagaatcgtaccagcagtctgagccttcgcccgcctatgtaaaggaaccggttactccgacatttgcgcgagagcccgaggccgagtcggctccagatcccaagactccagttagtatagcggagccggagctagagacataccacgaagcggagactgcacccgagccaccggctgaagaagtgcctcctgccgacgatgagtgggcggttccgaccgaagaacctgtgtcatgggaatcagaggagcctaaggcaggcaaaaagaagggaaagaaagggaagaagggtaaaaaacaagcggagatcgtcgaagaagaacctcccgcaccgactgagcctgtcagccttacgccgccatcaacaccgccgccagaagttgctgctgagccagaggcagagccagaaacagagcccgctgaagaatggtctccagtaaaccctgtcccagaagcagaatcagaaccggctgagtactgggcacagccagctgaagagcctgcacctgagcctgcacctgaacctgagcctgaacctgcaaccgaagagcccgcgcctgtagaacagcccacacccgctgcggaaggaccgatggaagattcatggactcaagacagaagcccaggcaccagcgttaccaaagcacagccgcaaagaccaatgctcgacatgtcttttgcccaacagaaagcatcctcatccagcgagcctggtctcaacctatgggacgagttcatctctctgcagtacaacgacgagcccacagcctccaagcccaccccggtcgagtcgccaagcactgagctcccctacattaccttccacgcgaaattatacgtcttcgccacacggtacctaatccccgctctcgcccagctttgtctccgaaagctgcatcacgacttagtcctcctctcaccgacggaattcgaaaccccccacctagacgacacggagattctagacggcttggcagcaaccaaggcgcagatggtgctagagctggtgcaatacgcatacacgaagacggcccgactagagccgatctcaccgacatccgccacacagcttcgggagaatgagctgcgtcgactggtagtgcactatttggcgtgcaacgtgaaagaattgtcacggtatcattcggcagaggattcggtctcggcgacgcctaatttgcggccggtagatgccaagacggagcgggctgagacctccacttctacgtcccctaaaagtcttcgtgctttgttagatttgacgacagagctggcctccgatctggtctatcgcatgatgtgagtggatgccgagatgtgattgggtctgggatatgcccagacttttggtgttctattttctgcgttaacttgatatgattttatgcattgatgccctcgagatgtttcgaaggaccgcgctggcgttctgttgcacaatttgaatgtgtcattttctgttttcgaggtgcattgcattatcttgcatttgtcctgcatgacgttaatctttttcttcttttctttctttccctttgaatgaatttgcaatttagattgtgtccatggctgtggtatagtcgtagccttccgggtgatcggtggggtcccgtcgacttggtaggagagagtggactctatgaactccataaccgccagaccctgattgtatcaagtgaattcctgatgacatcgacatgggtttcatcgtataggtcactctcaaacaaggtggcatcttggcaaaacggccaaagataagccaaccaactcaccaatgacgatccaaacatccccccttgaaagaagatcgaccgatcgacaaagatccatgtccgaatagtctcttggcaggaatcccagcgtcaatagtgctgtttgatgggggctgtgaaggctgtgagggtcgagaagttcaggggaaaggaagcgccaagagattccgaggtacgtcaacctgccaactccacctgactttgtgtcaaattctcatctcaacttctctccttgattttcagattgcgtgtcttctattgaatttgttctacacgtgcatactcggtacacgcaatggtgtgacctattatttcctctcctccaatcctgtctctgtcttcataatcaaagcttggcagcggtccgtcaatgtactggagatcgctcttggcatttggcgtttaggcacgttggaggcgcattggaatatccctgtttaggcttttctatacatctgatgccctatcgggagggctcggcgtcaaaggcaatcaaagtcggcccgtaactcggctttgagattcatcatctgagtaacctgtctctgattcaaagtgagtgttgaactgacacaaatgcacagattgtcaatcagcctactctgtactctcccaacgactgggtctccattcagggaaaatcactacgcaatggtttctacatgttcttggcagagctggactttccacccccctaggcatcgaagttctatatgcctaatgctcagatccgcagtggatctctgtgctttcggaactgcccctagaggcacaaaccccctgacgcatatggagtatgaatcgtccgagcccaaaatcctggccgatctattcttatagatttctccatgaattatgggtccgaaatgctcgttgaggccgctggtaggtccattgcaaatgattcctttgccttgcctaccttgtatataatcccctttcggtttttgatctttttcactatcaaaatgtagagtcttggaattccttggctgatctttagtgattccgaaaaaatatgaaatcgatatgcttggatgttctgcccatggtatattaacatcaccctttcgcaccttctccatcacttccattcatcactcatttacttcaattcttccagacttgacttgaatttgcttttttattcattctatgatcaattggtctatagtcctatcttgaatacattccacctatactccttttttatgttcaaaccttagggctgcatctatacctcattgcatacaaacacacacacacacacaatgtccaacccagttctactaggggtctaccctaaccacagccaagagcttcagcctccatctgcaccgccgtctgcaccgccgtctgctcactccgaaacacccttcatggaatcagagaagtaccagaagcagtacccactgagcttccgcgatcgtctccgccatttcacatgggcatggtacaccctcaccatgagcgcaggaggcctcgcccttcttatagcgaaccagccgaacaagttcacaggctaccacgagatcggcctagccatctatctgatcaacctcgtcctcttctccctcgtctgctctctcatggcagcgcgattcataatccacggcggcgccctcaactccctccgccacgaacgcgagggcctcttcttcccaaccttctggctctccgccgcaacactgatcaccggcctggagaagtacttcggcgagaaccccgccccatccttcacagccacactcgaagtcctcttctggatatactgcttctgcacattcactctcgccgttgtacaatactccttcgtcttcacctcgcacacctaccgcctgcaaacaatgatgccctcgtggatcctccccgcgttcccaattatgctaagcgggacgatcgcgtctgtaatcgccaaaagccagcccgcgcgcgcagcaatcccaatcgtcactgccggaatgaccttccaaggtctaggcttctgcatctccttcatgatgtactcgcactacatcggccggctgatggagagcggacttccatgtcgggaacacagaccggcgatgttcatctgcgttggaccaccagcgttcaccgcgcttgctctcgtgggtatggcgcagggactgcctgcgacgttcaacgtgatgggcagtgaggacactactgccgacgggcggatgctggagattctggcgttggcggcaggcgcgttcttgtgggcgctgagcttttggttcttctgtgtcgctgctattgcggttattcgggcgccgccgacgagcttccatctcagctggtgggcgatggttttcccgaatactgggtttacgattgcgaccattacgcttggaaatgcgtttgacagctccgcgattaagggcgttggctctgcgatgactatctgcatcgtctgcatgttcctcttcgtctttgtcaaccatggtcttgcagtctatcgccaggatattatgtatcctggtaaagatgaggatacctcggattgagatgtccttccgacaggtattattgtctctcgtgctgtttttgatttctttcttgtcacttttggtattttctcggctttttgcacagtccttgttcgcgttggtcttctttcattgcacacactactgtcatctcattgcggtctttttcattttgattcccaattcttgttgattctccctcttactctttcgattcaaaaaagcgttcaagcattttgttttctttgtcttggttctatgagaactctgcatctccggcgtctcatgtcctgtctgatcttccatctccttagcgactactacatttcaatagaattagaacaagaacatttcatttcattgcaatcatttcatacctgcctagtaataataaaacaaaacaaaaaaaaagaccaatccgttgtgtacaagtacgcagtctaagaatcagaacaaagaaaacaagtcacgcgaccgtaagagccctacttggaagccttcattgcaaaacaaacacaacactgcagagcggaaaaaacaaatcgcaaagcgcaatcaggaaacaaaacattgaagaggctcgtcttggcttcaccccggagggttactggaccccagcaccacgttgaggtgcgagccgtcgctggggtaaatggcagaataaatggcaagatacatggcaagataaatggcagaggacatgggaaagcaaacatgatgacaaagtccctctcttcacttcccagccggcaccaggttgccccaggaccggtgggcagaaggcgggggataaatggtgaacaagaaaaccgaaagatgcaagatgaataaatggcagaagaagttgcaacggagtccctctcttcacttcccagccggcaccaggtttccccaggaccggtgagcagaagacgggggataaatggttaataaatggcaaggctcgtcttggcttcaccccgaagggttactggaccccagcaccacgttgaggtgcgagccgtcgctggggtaaatggcaggataaatggcaagataaatggcagagaacgttgtaagcagacatgatgacgaagtccctctcttcacttcccagtcggcaccaggtttccccaggaccggtgagcagaaggcgggggataaatgataaacaagaaacccgaaatgtgaaatgtgaaatgtgaaatgtaaacaaagcgaaggggctcaccgttgcttcacccccagcacccggtggtgcgcgagccgtcgatggaggaaggtgggagaggatgtgtaaacaaaggacggtgacaggaaaagggggaagaggaagaaaacaaacaagtgatgatgatggatggatgggtggaaatgggagatggaggacgatgaagatgaatatgaagaatgggaaatgagagatgagaaaaaaaggagggatggggagatgaagaagagaagagggagatgggggagacagtggtatttatgggagaaacagtcgatggcctcaggatacacctggtcgccctggcaataactatgtatgtcaccattatgtcaatatgtatagaagtagaagagaagacaatgatattgaatcctatgtaagagattgtcaccttgctcagcaagtttttttgtgtgggtatcatgatgacaggaaaaagcagtcttgtgccgcacatggcttcatcgctgtgaagcgacaggtcgagttcatgctcgacagtcaggccttgagacgtctaagcttcgtggagcacactggcgcgcactggaaaaacggccagaaacacgtgacgccgacggcatctgatggactaccacgcggccccatctgctgggaaggagtgaactgctgaggcgagacttccggattggtgaaggccctcagagtggtagacttgggatgaagtgcgaaagccgttcacagcagcttaagcaatctttctgccgacgttaccgatgccacggccgacgatgctgacaatcacatctccatctccattgtcaggtgcgtctcggataccccagccgggggcaccaaacttggacagatctcgagcgagctggaccacgttgggatcagcaatcacatctcggccaacctgcagccgcccgacatcctccgatcccatggtcatgagagtgaacatggtggtcgcagccgcaggagccacacaaccacccttggcaaccgtctccagaagctggaatgcacactgctttccaacttcctcgggggcttgaccacccgacggtggagaggccacatcagccgagaagaggcagcccgtggaagactctgccaccaaagacaaaccaaacccaaggccaatctttttctttgcctgggggttggtcttatccggagctggtactaaaggcgcagacgccacgtcggagaaaatataagtatcagggctgagtgggttgaggataccacgggcagtctcaatcatgcgagcgttgttcgagccagacacaccaaccgagtataccacaccgcggatgcgcttgatgcggcctgcgttcatcaagtgcagagtcttcggcagacggacctggtggccaaacacaagttgcacttcaccaccgccacccctgccagtggggccagtgtttgatcgcctcaggatacggagctcgatgttgttgaagataccaaattgtttgtacagagggaggatcgctgtgcgaacactgtcgacggacatatctccagtctgtgtcgacgatgtgatcacaccaggtcctgtgaagagcaccttcatgggtgctttggcgaatggggccagcagacatagagggatcaggaagtaactgagaccacggttacagtttgaaggaagctcgtaggtgatcatgccgccgctggctccagtaccggccgtgctgccggtgattagacccggcttatagacaagcacagtacctgtgtatgagatctccatttgagagccattggttattgcatctagaaggcggaggaaagaaatttcatgaggcgcaagaccagggttcgtgggcgacgaagaacgaatttgggagatgtgaactgtgcggccggtgagggtggacaaaaccaggcgatataccaaattatgatgggatgtgaaccgaagggggggttgagaggtggccattttgtgtggttggtcaagtctctcgccgttaatcactgcaggccgactgttggattcgagattggaaaaagaaaaattggcggagggaagttgatccgggccgattgtttaagtccggggtggagctgatatctccggggatcagatcatcgttttcgctttctgacggttccgacctcatgcgacatttgcgaaaagctaccaaagtagaacactgacaagatcatattttgatatattcacgatgcttccaccagcactaaacattcccaaatggcaagtccaagacttaacatatctttcttacaatgcttccgaggttcccccactatatgataccatgattcatcacgcgacccataagcaagctatctaaacaaaagccaactgctaatgaaatctatccaggctcgaagagaactcccatctcctccaaccaccggtcaacaactattgcgtctaccacccctccgccacagccggctacacggtgatgatagtgggcgggcccaacgcccgaaccgactttcacatcaacacaaccccagagttcttctaccaataccggggatcaatgctcctcaaaacagtcgacaactcaaccacacctgctactttccaagatattcccatccacgaaggctcgatcttcctactgcccgcaaacaccccgcactgccccgtgcgattcaaggacactgtcggtgtcgtgatggagttgccgcgggctaaggatgcagtggatgctatgagatggtattgcaggaagtgcaaggagattgtctgggagaagaagttcgtttgtgttgaccttggaacgcaggttaaggccgtagttgaggagtttggggccgacgaggaaaagcgcaagtgtaaggcttgtggggagattgcggcgtcgaagtatcaggatggggaaattgtgcaacccccgactcatcctgagtagtatactgatcaggtccatgaggtgaggttgtaattctatcagttatgagtggttatgagtggccaattcaatattcctcgatgataaggatagaatagagatagagtagaatgagacggatacgttcctcggcatatcaatgggcgatccgagtcgaggatatacaacggaacatgggaagcagatatacaccaacgaacatcttattatgaccaaaggcatagtatttattacaagtacaaagccctcaccgtgttcccattcctctgctttcctccagctcccgaaaaagcaaacaccatttattaaccgggtaaccgacccaacaatcatgtactagaaaaaacaccccatagatgcatgcaacagagctgtgacagagagctgtgatcttatgggatacactgaatccatgtctctaatatccagaacattattcatcaaacgggcaatcgatgctttcatgcccatcttgctcacagagagcacaccacttggactcatcgacgactccggatgacttaccagcaacggcagccatggatgaactcagcccgccgataccttttagtccttccatgaccacatcccgtcctgtctttagtgcggggggagtattggtacggatggacgaggctttggtctggaggggttccgtcttctcaattgggtgttcctcggcaagttcatcggcagcctcatgtttgggattcttctcttcggtgttgttctggccagagccgaacatgctagtgcagttcaggatgtcgtggccacctgtttcgcagatctcgcaccacatggtatcctcgtcggaagaacgctcggattcatgcatggtctccagtcgcgattgagaagagtttgacatactacggtgatgatggaggtccgaaggagcatcctgccagtcggtcgggaccactgtacggtcagagagacgattgctgttgggatcatctaaaggattggggacattgcccgcagagtgcgatggcctgtgttgctttggcgaaagagtgacagtagaactgcggcgacgaccaccagactgcaggtgcatttcttgaagttcacgctcgagctcttggatgcgattgtttttgcgatttgtagtttcttccacctcctgcagtcgaatctccagctgagtaacgtgctctggatcatggtcatgatctgccgagttgttctgtccttcgccgctgggatttcctcgactcagagaatgaataatggccttgagccctcggatctcatcatccttctggtccaactcactactgcttcggggtccgtctgcggcggcatgtgcatctttcaatgcagcggcggagtgatcacgctcctttttcagctccagcttggtgcgttcaacttcaccgcggaggaactcgacttcggccctagcctcggcctctccacgccgggcgtcctcgaggccttcctctaactccgagactagctcttccagctgcttgagctgctgcgcaacaacctcaacatcttcgccgcggtcctgcagttccttgttctgctgtataagctcgtcgagacgctgctcgtagacgcgttctgtttcagaggctgcaatctccaatgtgtcgagggtgcttctgaagtctgcgcggtgaacgtcgaattcggccgttaattggataatccgctcgttacgttcacgtaattgtgtgcggaatgaatgaccttccgatccctccatctcctccaaggtcttctggaactcgcccaaagttccggactgctcgtcgagctgcttatctcggtctagcagctgcttctctagactcttgatctgatccttcaagtcttgaatctccgacgagggcggtcgacggaagtccgacggccgtccatacgacgaagcatcatcatccacactaagtcgcgacgatggtctatcagacagccgagatggagccttgacgggactacgcatgccaccgttcagccccgctctcgatgcagtcgacggtgtacgcaagccggccaggcttagtttcggaggaggcggcacgcgcggagattcgggtcgagggagagagggtcgtcggactcgagggcggggagtagcaagagctgcaccgacagatttgctgaagttgaccggccccccacgtgcaggagtaatcggtgtagagatatttgaggatcgccttgtgacatacttgttgttgttcatgggcacgaatataccagaacccggaatcgaggttgtgaagtacttccggccctcaacatcgccgctgtttttgcctctttgcgcatgctcggcgctcagttcgacacctgcgaatcgtccggccttccccgctaccgatcccaagtatttgatcgtcccatgcatgccaccggggacattcaccacgtcaccgacctgtacatcatcgtgcgccattggggagaaatatggggtgatatgaatatgaggagaatagggtgggatgcggcttttaaataatagccccgggcgaatatcgatagcccctggaagggtttggaagtcagggtgcagagggagtgtttaggagaatgcaaggatatttgacggcccaacttccaccatgacgattgggaaggggaaaaaaggaaataagtggaaaacgacaggcccgattagtcccgatttaattagttagaataagagaaatgaaggtgatcgagaaatccaacgaacgcaacgacaagagaaagggggaagacaacaaataaacgggactccactccacgtaatgccaactgacatcctcaacttccaccatctcctcctcggcatatacaaaccttgcctctgagtctctgcatctccaagacatctttccgacgatcttgtccgttccgtacgaactcctgcgcaactaccacctaccgtgccggacgtcaccggggcccgacatctccacctcctgccctcgcatcatacaccatggcgcaatatttcttcgaccttctatacaacttcacggattgcatgtgttgctttcccagctctccacagctaaagatcaacaaccgaagtttcaagctcctacgtttgttgggcgaggtatggatacccgataacgatagctgcaagctggtctgaactgacaacgcaacagggtggattttcctacgtctacctagtccaagataaagcgagctctgaattattcgcgctgaagaagatccgctgtcccttcggtcaagagtccgtatcgcaagcgctgaaagaagtcgaagcctacaacctcttcaactcccaatccaacatcatccactcgatcgaccactgcgtgtccacagaatccggctcgaaattcagatccgatggcggagatccaggctcgaaaacggtctatatcttactcccatactaccagcgcggtaatctccagaacgctattaatgccaatctggtcaaccataccaagttccccgagaagcggctgatggtcctgatactcggtgttgccgatgcgctgcgctcgatgcatcagtatcgggtgaagaacggcgcggcgtctacgcgaaaggtgaaggctgttcggagagaaggcgaggaggcagacgacgaacggaccatgcagatgaaacccaaacggagggctagccatcgcgttcctgagaatgaggatgaggagaatgagcctctaatggatgatgaggtcacccggagtcaggaaggtgtcgaggatggggacctgcgcccctatgcgcacagagatgtcaagcctggtgagtggccgcacatgcggaaattccgaatcgactcgacgagctaactgtattacaggaaacatcatgatcgacgacaacggccaatctcccatcctgatggatctaggctctttggcacccagccccatcgccattacgtcgcgctcactcgccttggcagtgcaggataccgcagcagaacacagcacgatgccatatcgtgcaccggaactcttcgatgtgaagacagggtcgattattgatactaaggttgatatctggtcgctgggctgcacactctacgcctgtcttgtgggcaagagtcccttcgaggcgcgcagcgaagagaccggtggcagtctgagcatgtgcgttcttggtggtgactggcggttccccgatgagaagtctggcgcttctaagggtaaagctaagtccggcgaaagtgaggatgcgtctaagaatgaggtccctgcgatcagcgcacccgtcaaggatattgttcgcaggtgtctcactgttgaaccctcggaacggcccgacattgacgagcttatcgagctcatgaagagtgtcattgatcagatgcctgaagatgatgcgggcccatctcactgagatctacttggatcttgcttgttttctgttttatctgcgttcttctttttgaccggcaggctccgtgtgggcggtttctttgactgtacattatgaatgcgaattgatttttgtgatatcagggctgttcactgtctactttttgctgttcgaattaccagtgtgtctataagttgcaacccataattctactcgatgtttatcgccatattttttgcttcagtcgtgactctaccatactccgagatggcttcatgatgacgacatgccgagtttgtccacgattcacaccaagcagagatctctcaacccaatccaaaccaaacagaatcgagcacaatgagcagtaccttcgatgaccatacacaggggacggacgtgttgaatctgttcccagaccgggtgaagcacaaaacatgtaccgccacagccccaacccacgcggtataaaaactaatctccaccgcatagttttaatatccggcctcagacgaggtgatctcgccgcaatgaccgcagacgtcctcgcgcacggcggcgcagggaccatcatatacacaggccgctcaaagcacgaactccagcctgtgatcgaccatatcaatcggaaatacaaaacagtcaaaatggtctttgtaactgcagactccggcagcctgacttcgttccgcgaggcagcgcacactatcaagaagctgggcgtgtcgattgatggcttcgttgggttccccgaggtcatggctgtaccgtggtcgctcacggaggacggattcgagtcgcatttccaaaggaattacctgtgttatttcctgctgctgaatctgctgcgtgatgttatggggcccaggtcgagggctgttctggttacgtctagtttgcggaatgaggcgcctgcgcctacgtgggatgatttggggttcgaggtgagtgtgattcttttgtttggattatatgtatacttgctggtgtagaagatgctgatttggatagaatggagaaaattaccattgtctcgatgggtattcgcagtcgatgctcgcgatcatcttgtttatcaagtcttttgcaaagaagcatagtggatctatcgctgccttttctgcaaatccaggaagtgagttattaatgtcgtgaatgtgtttttgattctcattctcattcgatctagataccaaaaccaatgtccaaacatatgttggatgggaggaggtcaaatcctggctgcagcggaagaaagaaggtacgtccagataactaacagatagcgaagaccatttcatttgacaggatttcctttatccagccggcgaagacctaccggttcttttgcaacaagcgccgaagtccctttgtcagggtagtggcgctgtcttgcgcgggttgctcgatccggagcttgaaggtaagataaccatccgacgacaatgtgtctgtactgattggtgggtatgagtatcagcccaatctggagcctttctcgatcattgccagaccccaaaactaccccatctcgacttcccagcaggcgaagagagtgcagaggcgttatggaaacgaagtcaaaaattagttgaaccgtttctttcctgaaaggggagagagacttaggccgaaataggaaggtaatctatgctatcaaagtatcaaaggagtataggattccgagattactctgatatcggactcgacgatgttctttgtattcggatatctgcagtgaaagtgatggctaaagagactatatgccagtctatgccagtctataaatccatacaagcccatagaatccctagaaatccaagatataaaaacagaaaatataagaatccttgccaagaccttctttgcggggaaaagttcttatcttttctcctcgcctcctcttcatcttctaggaatctcaacatgtcgatcttcgatcatatctgtgttatctttatcccttcgattcggctgccttgatttaaactggctctcctccggtaaataatatctcatacttgagcgggcttttttttctcttgaatttaccccattcatatatataggaaggaattgtacttcaccatggcgccagtcatcgacagcacagtcatccctggcaccgtgactctggtagacgtggatcatgtcgtggagacccggcacttggaccacggagaccgtgacattgtattgatcccgaccccgtcaaatgacccagatgatcccctcaattggagtccgagacggaagattctgtcgactgcttgcgtgagcatgtaagtgcaggctatgacctgagccgaggatcaatgttgactttctagctatacgatgttctcaggaattgcctgctcggtcgtttactcggtaattacgccgctgcacgaacaaacaggattacccattagtactctgaacgagggaagcgggtatatgtttttgttggctggctggggtctgctgttctggcagcctttcgctatgcaatatggcaagcggccgacatacatgttgtcgttgatcggaattttggtatgtcattcttaattattttggatatcacttgaacagtatagctaacaaccctagggtatgacgatgtgggggtaagagcaccataatgcccgtgatgagacaagactaacaccaatcagaccatacgcaagcaccaagggccaatggctcgcaagaaacatcgtcttgggtttcttcacagcacccgtagaagcgcttcctcagatctccgtcacggacgtggtaagtaaaaccccatgaggaaatgactcacgcttacacaatatcagtacttcacccacgagcgaggaacatacatgggtctttatgcattcttcctagcaggaagtaactacctagcaccggtcatctgcggctttatcgctcagtaccagggctggcggtgggtattctactacccaagtatcttcgtcggcggtgcccttatcttcctcttctttttctgcgaggaaacaaactatgttcgagcacagcccgacgagcctagcactatcgcggaaaccccaaaactcagctcggaagaccacgaaaaagagaaatctgtggatgttgacatggaagctgccactagggctagtataagttcgggctacaccaagaagtcatatgtgaagaaattggcgctctggggaccgagtcaggagcaaaatacttttttccggcgactctggcagtgtctttactacctgtcctggccggtaatcttctatgccgggtatggatacaacgtttttgattttatatacgttttgactaacatgcacacagcttctcttacggatcctatctggtttacttcaacatcatgaatggaacagcctctatcattcttggtggagagccatataacttcgggttggtcttattattacccgaacaatgaacggagcaagctaacaaatcccagatcttccatggtcggtctgagctatctagcacccatcaccggtgtggtcctggggtaagatcttcgccttggtccgatacttcaacgcaagctgacagtaatagatcttttttcactggccgatttagcgactggcttactgtggaactcgcccgccggaacaatggcgtcatggaggcagagcaccgtctctggcccttcctagcttgtgtggtgcttgtgcctgcttcccttattctatggggggttggtgctgcccatgaggtccattggtttggactaattgctggaatgtgcatgctggccttcacgaatacatgtggcatcacgctcagcgttaattactttattgacagctaccgagagttgagcggcattgccatggctagtgtgattctgattcggaataccatgggctttgcaattggttatgggtaagttttactcttccaattctagcagacaaacactaacttcgtttagtatcacgccttggattgagaacatgggttaccagaactgtttcatctccgctgctttcattggcatggcatgcgcctcagtcttcctcttcatgattaaattcggaaagaccttccgtgaacgttcccgcgagaagtactggaagctggttcaagagaactgggagaagggcatgggcaattagaatagatgcaccgttataatacacgtatacagctcaatagaccaacatttattacacaggagtctgttcctcagcaagatgaatagccccttcatcatcataaacaatctccctcaccttaaccgacctcaaatgatcgatcccctcagaaagctcacagtcatgataaaacaagtaccatttcccctggaactcaacaatcgaatgatgcgtcgtccatccaagcacgggatccagaatgcgtccctgatacgtaaaaggcccccaaggcgagtctcccgtggcataagctaagaaatgtgtatcaccagtcgagtaggagaagtaatacgtcccttgataccgatgcacccaagcggcctcaaagaatctcctctcatgatcatctgccagcaagggctccccggtctccggcgcaaggataacaacctccttcatcgacgacacaagcgaaagcatatcatccctcaacagcgcaacacgcggacaaagcgccctaacaccctcgccagtaggttcctgaggtccagacctactctcatcgaaaacaagtctcttcttccgtccagcaccctccccatcaacacattccccctcccccccatcctcatccttcccctcaacccaacattgcaactgtcctccccaaatcccgccaacatagagatacgcctcgccgcccgcttcttcatcaacgaagacagcaggatcaatgctgtatgtaccctggatataattatcctgcgggatgaacggtccttccggggattgagagacagctacgccaatacggaatattcctttgtggtctcgggccggaaagaataggtagaacttgttattcttcgttgcggcatccggggcccagagttgctttgagacccaaggaatgtctttgtctcggaggacaacgccgtgatcggttacggggctggtgattgtgtccatggagaggacgtggtagtcggccatgtcgtattggtcgccattgtcgttgaaggtgattgttgttttgcggtcgtggctggggtagatgtagagtttgttgttgaagacgtgggcggaggggtcggctgtgtagatgtgggagacgagaggtttgggcatggtagtggtggtggtgatggtgaggttatatagggctaaatgtatagatggaagagctgggtatttaggggattgaaggctattaatatttcattctctactatcctaccatgttactatgctaaattatcccctcattatcccactatcatccccttattagcctatagcttgtctctatactctatacctcttttaaccgacggctaaataaccacggcgcaaagtccgtctcagaaaggaaacccatgcatagcccggattcttcatgttctacattctgtctatattccatttcatcagaaatcaaactcacttcaagttccaccgatgcccctcctcagcatacgctctttgcaacgcctgctgccactcccactccatctggcgtagcacctcatcttcacctccattcatatcttccccattatcactaccactcccatgttcatcatgatcctccatttccgcatcctcctcacaccccatcaacccaaaaaatcgccctaacctccgcaccctcgtagggagatcaatggtcttctcctccgccgtgccaatccacggggtaatatgaacaggataattatatgtggcagggacaggcgggtagacctgatggaaatgacgggcgaggttatcgacctgctccgaggtcagaaggttgtaggctagcatgtttggtgggaagtccgggtgttggaggcctgtttcgcagttgacgaggggccagaggtgggaggagaggtggcgaaggaggggtaggaaatgagggtggaagttagggctttcgcgaaaggtgatgttgggatattcaattgggaagggggattcggtgaggtctagaggtgttatgcttgcggaggacatgctcattgggcttagggtatctgctatggttgtggttgatgtgcagattgagagggttcggtcggagagccagctgatgctgtgaggggagttgggggttgtcgggtcgttttccattttggtgttggtagttgtaacggtggtagtggcagtgttgaaagacaagataaaatacactatgcaaagtatgaagaatgtaaattaaggaaaataaggacacttatatagatgaaatgtatgcgattgtcgaaaacttcaaagaaccaacgacaatgagatgagacgtctcgaaacagcctcttctttataacacaaagacatcgtgagctctccaatcaagccgagtttcacgcacaacccccttctccgctttgtttccaagaaaagaacaataaccatgttcataaatatctgtcatatacgtttcatattcaagttgagtctcccattggcccaaacggccaaatcaaagagaccgttgtcatcacagcgacaaattacccactgcgcgtgacagatcgggctcctctgacacagctggcagacccacgtacttgttaatccagttcaaaacggtccggtgccacatgagcgagttttcagggttcagaacccaatgattctcatcagggaatgtcaggaacgcactatcaatgccgcgcatctggagcacattaaacgcagccaagccctcggcgatagtcagacggtaatccaactcgttgtgaatgatcagatgaggcgtgtcccagttttccgtgagccgcgacggatcccacttcgcccagttctcgggcaccttccagattggccctttcaggtcgtgtagagggaagtattgttcttcactagccatctgtgacgtcatgctaaacactccgtcgtgagtgactaacgccttgaacttgcgaccgagcaggtttccctgcatccagttcatcatgtagccgccatacgaggcacccagtgcaaccgcgcgtgtgacgtcgacgtactctaggtgttgctcgatatagtcgaatcctttgactaggtcctcgtagggccgaccgccccattgtccctggattccgtcggtgaagggctggccgtagcctgtactgcctgttggattgggggttatcacaacataaccttgttcagcgaaaacagcggggttccaacgcgtgctccactgatcgttccacgcgccctggggtccaccgtggatcaaatacgcaagcgggtatttgttcccgggtttgaagtccgacggcttcacaacccacgcatggacagggtggtcttcggctcccttgaaccatatttcatcgacctgagacggagacaagccgaatgctctgccgccccgcccgtttgaggataccagttgaacatcatctgggcgggccgggtcgatgatggtccacaggctgttatctaccaggctgctgctagacacgaacaacttgggtgatttagcagctgctggaacggcatcgttcacgtatcccgatctggtcagtctctttaaagagtcgggcttgattgtgtgcgcattctccaatggcagctggtaaagaactccgcgaccggcctcctcgacatgaataagcagtgacttgtcatcatgagcgaacgatatagctgatggactgagatcccagagtccttcgccgtcgtccgactggaaaatttcgatcatatctccattccacgggttgggaacatacaagatacggttcttatcagactcatagccatcctcgcgcatcgtcagaacggcaatagagctaccgtccgagctaaggacaggagacgacatcgctccctgaagaccagcaaccttgcagattttcggtccggggtcactcatactagtccacgagaacatgggagaataatagcatgagcaagaggtatgagtcgcggggtttaagttaggatctttcgcaataaagacaatagccgacggactaatatcaaagtctgcagtaccaccaaaaggcggaatcggcgactcgacgcctgtcagccccgagaccgcgatcaagtttgtgaggcccgagatggaatatttcccagagcatctacgggccggtgacagaggagcctgttctagcaagccatagaagattgcgttcttctggggctcgacatacgagtcccagtgcctaacaaagagagacgtgtacagttttccggttgtatggggcttcttcgcatcgtggggattgtatagcgatccgtctgtattggccttgcctgtcacggcgaagccgacttttcctggctccagaacgaccaccttcaagtccgataccgggcctgggacagtgcctgcggtgtatgtttcattggcctggcgggcatcgccgacaacaaagcttgtattgccgttgcctttggtctttagccagacaagtttgtcgctgtcgtccacccactgtgggttactggcgccggggtcgttggtgataagggcagagcggccagagctaatatcgataacgcggatttcatttgtcttggcatgagactcgaaggagtaggatgtctgcgtgtagactgctagtgtgccggctgcattgggggtggcagaggaccgcctgggtgctccgagcaggaccctggagtaatcagtgtcagcccaatgcccccaaagacgttcaatggatattgatgtcaaactgtcaagtatctcaagactacttactcgggagtgaacttcatgttccgaatggtcatatcagatcgtatgggagataagataggaagctcgggggagcttccaggatcggattgagcttaaatcgaggtatcaacagggtctaagtatagatgaaaaacgaaaaacacaagttatgtatgctattgatgataccaagacaaacagggtatgagaagaggagagttggagaagagaagatgaggctggggagcaacgtgatcatgcgggggttacggtctggatcgggttaagcgccatgtaccttgcaggcatggcatatactgtgttacatcgaggaagaccaaagtaatatggaaccgattttgtactcttagacttcggaaatttaactattattacaaattgtaaaccagatcatgacatttactcttcctcttcctcgctttcatcttcgtccattccctccgccgcattgacactgaacgtaggagcctgatccacaccaacatagctgtcgctcataagatagagcgtcaactcatggtttccaggtgtagggactacatattccaggcgcagctcgagcttgcgaccgatggtgactcgtttgatagccagcaggctcttggtcttttcatcgccgacaaccaaccaccagttctccatcttctggttggggtagaatggtgcatggacagtagcgtcgggctcctcgtcttcttcgatgtcccgctcgattttgaccttgaggtatgcgggttcgcccgaagtgataccctcggcatcctcaacttcgaagtcaagctcgatgttgggatacttctcattggtgaaagccgcagcttgcgccaattgtttgttgtcaaggccgaggcgcttgaccaaagtagcgtaatccttgttctctgatggatccatggcctccatgaattcgaagatatcattgattctgtacaaagggtcagcaaatgtgtctagagatatttcgaacgatacatacttgtactcattagccaccttgatcacctcattagagaagtggggaatctgcttcagagggctgtcacgatcccacatggcctgaaccaccatctgggacagttccatcgcgttcatcgcgttgagatgaccctcggatgagaggacatccacacaagcgctgagcaggttgaggaccttgcgaacgatgtcttcctggtccttggcaagatcaagagggagctgcatgcgcgagaagtgggcctggaggaggacgaaagccttgaaatgaggagagtcgaaggaaacctctgacatcttgaccggtacacgatcatacacgcgacggagaatgtgattctcatggcgacgcatctggatagactcaaactcggtcgccgatgtcacaatctccaggatacccttgagcttcgttcgagacgagagagacaacaagaatgtttgcattgtgatgaaagagatgttgtagtaagcacagatcatagcagcgttcaaaggcgaaacgctgtcatcttcttcatcaacatcgatgatctttgcctctgacaactccttcaatgtattctccaccagttccgagaggaatgtgctgagtccctcgtggctcacatcgctaaggccgtagaaactggggtttgcaaggagacggcgatagaaataggtgtatgtcatccaatcaaccgcatcctgggtggaggagatggtccttgtgctgacttcagtcacaaaggcatcgtggaggtaaacctgcaggtgactctcgacaggcaaggcctcattcaagaacttcttgtagtagtcgcgcttcactgctggcaccataagaacaccacggccaagcttgtcctgaccgggacgggaggctttgccgaacatctgtaggatatcgctgatggggtagtcgatgtagcgatgttcacgaccatcgaagaattgggtgttcataatgatgaccaagtgagccgtgatatccagttcccagcacacatctctcgaagctaacagcacctgaatcgcaccaatgttaaacaggtgtaagacaatgcgcttgtcagtggcattgagagcttcatggtagtagccaataccgtgagaaagcgatgtggcaagagtttgctcatggacacgttcaagcaaaggcgtaagctcactggcatcggcgttcaggaaacgatcttcatcgttgtcgatagcacacgccgagagaagatccgcagcggtcgcacggacctgcttgcggcttggcacgaagaccagagcaggcttatcgggagagagttgcaaaatcgattggtaggccgggcgagccattgcaagcatggcggatgggaagtgagggatggtgaaagattgaaggtggagctcaagaggaacaggacgggcatgagggctgaagttgtagatggtgtgcttgttggcaccgatccactctccgatatcccgagcattagagagaggcacgctaagaccaacaatgcgcatttcattttcagtctggagagcgatgtagtgcatgcgagacacgatcacttcgtacacgtatccagcatagccaccgagcaagtgtagctcgtcggggatgaacagttgcactgtctggatgttcttacggcgctgccactggcgcgacaacacatcccactgagtaggagtggcgagcacgagatcagcctgttcaagaagtttcaaatcggctgtggtttcgcccgtgagcttgacaatggttttacctccatccagtccaccaagacgcttctgccagtcagctagccggtgatcaacaagctcctggaaaggcgcaatgtaaactgcgcggccgctatcctgtcttgaccagtgacgaagcaaggccaactcagcgcaaacagtctttccacttcctgtgggagcaccgatgaagatattgtcattggtgtcgaatactgacttgaagacctgagactgaatcttgttgaaatgctgccagttggggtacagtgcttcgtagtcctcacgcttcagtgctttgacgggtgcgcgctgcatgtcgagtagaggcgtatggggagggaaacgctcgggaagaaccagcttctggaaggacacggcaatcttcgtctcagaatgcatccatcggtcagacacaagcgatatgaagtagttaggaggcatcgggtcagtgacaggaacagtgaattcgacgagatgctcattcatctcggacttggcaaattcagcacgaagcaagaatcgatcatggaacaagatctcctctccgtcacagtcctctaccaaaatccagaaatcttgagcgttgccatgtatttcgtcatcccagacaaaattgggggtaatggtcaactctacccgcagcatggatcgcgtgatgggctgcacttgagcttgaacatcgagtcgagggaacttggataccaagtcgcacacaacacgtccagccttgggcatgctcagaagctcacccatacggggaggatccaaatcgaaataactgctccaaggcacatcaatgcgctccgccttctgcaagacgtcccttgggcagtgagggaattgacgaaggggggacatagttggccacatgcgcttctcggccattttgcacagatcgagcgcggtcttggccactgaggcccagcctttcttcaggcaaatctcgaaaatcgcgcggatgatacgtccagcagattgagtgacatagaccatgtctgccatcagggccagcccctcaagcttgagcctagagatataagcctgcaaaagaacattgattttggcatgaggttcatcaatcgtctccttgacagggatgggcacccggccgagcagttttcctaactcaagcttctcatcctgacggaccggaatgtatttaaactcatcactcaaggcaaagattcggaataattcaatgtttgtaatagagggctggaggtgttgggagtaggtcagcattgagttgtgaccaatatagtagtgcgaagagatacgtccaagctcagtcgactgcagacgcccagtcttcttatcatacttcacgagaccggccttctcaagtaccacagcagcggagtgaataagatcaactcgcttttgctctagtgcatcatcgttctgataatcggcgccaacactgtacaggccaggtgatcggagcatccgaacgtaaaggtatgtgtagcctagccaatccacaccttcatcgcgggtacggacattgccaagtacaatctcagcattgagattgtccgccagtttgctcatcagctgcgactcaattggaagctgttggttcaagagcgagaggtagtattgaagttcagcttgcgatgtgatgatgataccctcaccgaaggtatcatattgtggtcgaccagctcgtcccaacatctgcagaacgtcttgcgggctcaactcgacccaggcacccttctcgggggagtagacctgagttcccttgatgatgacggtgtgggcgggaaggttgacaccccaggctagtgttgcggtacaaacgaggacttggatgcttccatcggcgaaaagagcttggacggaatcacgatcggcaagactcagaccagcatggtgaataccgagaccgtacggcatgagatccttcaggttagcatcgtccacagagtctgcttcttcggagagaatggcacgactagcagcgtcactgcgcagaatctgaccaatggtttcattctcaagagccttgtctctgatgtacttggcggtcttggcagtctcctttcgagagtggacgaagatgagcatttggtttcgttgttgcccgacctgctccataaccttggtataacagatgtcgttcatcgtcttcaactgtttgatggccttcttttcggtgacaccgatgaattcctgcttgagggggcaaggacggtagctgccgtcgaaatggaacgtgcccttgacaggatctgcgcgcaggaaacttcccacatcacggtagttgggaagcgtagcactgagacccacaattcgtacaggctctccagtctgctcggttttgcgaatcgttcggctaacgatgctctcgaggacggggccacgttcatcgtggagaagatgaatctcgtcgatgacaataaggcggacaaggttggtgtagctagtttcagttgcctttctggtgatgacgtcgtacttctcgggggtggtgacaatgatctgggtatcggcgatttgctgcttggtgagctgacgatcacctgtgagctcggacactcggataccataaggttccaagcgcttgccaaggttgccgacttgttcctgaaccaaagccttcaagggagagatgtatacaattttgaagtcatccagcatgatctctcctgtttcagggttgcgattcttcccgatttctcgaaggatcgcgagcatagcaacgttggtctttccggaacccgtgggagcacaaacaagcaggtttccatcgtcaaggaaagctgagggatagcaccttgtctgcacacggttgagttcttttgaggttccaaatccaacacgggcccattccggcagctcagtggtcgggatattcttctctccagcctccttcttagccttaggtggtggcacatggatctcttcgtaccccttgaatcctcgcttggttgagccctggggaagcttgacattggcattggtcataagatgattgccttgatggaagaccaaattttccaaattgattgttctcttgggctggagaatgccagcctcgccaccttcggctgttttgtaatcggtagttggacccgaaggaacatcgacatccatcaagtcgaacttcatcttcttacctggtggtgctccaagttcgtcaccggtttctttgccacggatttcatcgaggatggcacgttgaccggcttcgaccatctcaatctccacgagattgcgcgcagaaggatcctctgcgactcttctccagcgagtaacccagacggccttgtcacgattggtaactagtttggcgacaagatcgggatggtcatagtcgaagagttccatgaggtcgttctcaacatcgcgcaggggtttcaatgttccatcctcgtccttcccaccgaggatttcaagtgcttcatctgttttctcatgttgaatgtgagcatctgtgtatatcgcaccgatttgacgttgcagccagtaagcgtcaatttcgcgagcggagacgttcaatccggtcttttctgtggctttatcacttcggccgagacctccatcgatgaccatttcatctccgtcttcgtcttgggctgctgcagcatcgtcgattgcgagtcgttcctgttcatcctcctcttcttcgtcactgagctcgtcctcgtctcgaacctcgtctacggttcccatgcgctcatcgtcttcatcttcatcgaaaacgacggcaacaccttggcgttcatcaagttcgccaccctcttcctcgagaccgccttccacctcttcctcttcgtcttgggcatcgtaatctgtaatttttttgccgaggttcaccagctcgttgaactccttggggttcattgaggtacccagaagatcatcaatctccttctttttatcaaaatccttcatatcttcgtccttcagtagttccaaaactgcatcggcagcacttcgaacgacttcatgcggaacatcgcccagctggcttccagtgattgtgagaataaggtcatacgtggctcgtgtggcgggtgtgcggggacgatatttcaatccttcgacgaaggcatcggcggctgaaaggatgccctggcctcgaagttgtgctggttggccgcggtggcgctttttctgttcgcgtagaagcacatcttcaccctcgccgattgcaccccgctcaagacctgtcggggctgcctttttagatttgggcgcgtcttcacgcgcgactcgtccacccatctcccgaatcccaatgcgacccgctagagactccgggtctccagtgggttcgtcatgggtgcgagtgataaaacgacgatccgcctggagaaccaggttggacatcgccgagtacttatactgtgagatatcttggtccgccatcttgttggttgtatggctgaatcaagggaaaaaggatgaaagaaagagtgagttgcgacaagaacctgcctgcggagggtcaagattcaggccgcgccaagacacgagatgtcggcgattgatcaattttaaatggtctcacaaacctggctcatcctcctgccgcaagtaatatcacttgtaagggagaaatatcagccaaggttgtagctagtagatctcaaggagagtgcagctcgggaagatttcggtggcgaaggcggaagaggggagcttgaatggttctgccactcgaaacggttcgggggcgcgtcgcaacaatgcgcgccggtctctctcgtcgtttaatgccagtttatatgaggcctctggcgactttgatacgttcatctgatcgttgtaacattcaccggaccatatgtcaccatgcacgtcgaacctccatacaccaacgcgtgtacaccgccgcatcgaaagtccacaaacaaggcgcaaaaactaaagcgacagtaaagttgaaagaccttcctcaaggagttttgaaactcgaggcatacgatgatcaggtggatgaggctcctcgttacccgactgtggtgcaggggcaccgaaacaatatgcaaacgttcaagaattgtgttatcttgacccgggtcgggggcttctatgaggtacgataataggcaccacatggctagagagctccatgctgagagtgtgttctgtagctctattttgaacaagcagaggagctggcaccattgctcaatctcaagctcgcgaccaaaaagaccaacggcgggccggttccgatggctggctttccctttttccagcttgatcgtttcctcaaaaccctcgtcggagatctcaacaagtatgtggctattagcgaagagttttccattaatgcagaagacaaggcacgcacgagcggcctcctctttgatcggaaagttgctaggatcatcacacctggcacgctgattgacgagaaattcattgaccctaccgagcataattttttattggccatatacttggatgtgccgtctttgaaaatccaattgaagcagcacgctgacaaggatctccaatcatcgtatcagcatatcctagcctctgtgccccaacaagtaggattgtcatggcttgacctctcaactggtgatttctttactcagctcacaacgagtcaaatgcttccgtctgcgattgcacggattggagctcgtgagattttggtagatcagaatgtgcaagatcttattggacatgaattgcaattgctcgttggacacgatcatcgccttgtcaccttcttccaataccctggagaattcaaaccggtatctgaatgggggacaatgttagagtctcccgttcctgaagaaactcacgcctccttcacaccagaggaagtagcagctgggtacagcctgcttgagtacattcgcgtgcagttgcaaggatcgaatctcaagcttcagcctccaattcgaagacatttgaatgaatcaatgggcattgatcgtaacagtctgagtggtctcgagattttagaaacagccagagacggttttgggaaaggaagtctccttcacgctgtgcgaaggacttctacaaaaagtggtgcacggcttctacgagaccggctaagtatgcccaactaagagtcaaaagcttttgtatagctttgctaatgcattacatacagcctccccatctacatccttacgagtcatcaatgagcgtttggaccttgtctcggtcttcatagaaaatgtcgagctccgtgacagcgtcatccaacttttgaaacgcagccatgattctcaacgcctagttcagaaattcgcatttgggaaaggggacccggatgacttgatttgtctttcccgcgccattgaggcttctaaggaagtcagacaagttcttctagatcacaatagactttcggtctcatccaatacttcagatctgaatcacagtcttactatcatgatttcacggctttttctcgatggtcccattgcgctggcggatcaaattcttgcagccattgacgaagaaggcttgttacaaaaacaacgcatcgaggatagtactgccgcagaggcagccaatctggcacaaaaggtcactatggatgaagccacctccagcgagctcgaagcgctgccgaaaaaggtcagagcaaagaagggcgagcgaacagttatggctgatacggactccggtcctatcgatacctggattatgagacgtgacgctagtaagactttgaatacactccacggggacttggaacgattgggcgatgaaaagacttcattgactcaacgtctccgtgattcagttgattcgtcagccctgagccttaaatggaccccagggttgggccacatttgccacgttaaagggccaaagatatcccagaaatccctagaagacttgggggtcactcgaaatgtctcatcgaccaaatctacccggtcattctatttaccagcatggacagagctaggagtaaaaatggaccacgtcaaggtccggatccgtcaagaggagcaaacgatctttgaacgtctgcgccgcgaggtgatcctgaaccttgtcaaaatccgccgaaacgcagcagtcatggatgagctggacgtggcgtgttcatttgcaactctcgcccaggaacaacaaatggtacggccgattctcaatgacggtacctgtcacaatattgtcggtggacgacatcccacggtcaaactggggttggaggaacaagggcgatcgttcgtgagcaatgattgcttcttgggtgattctgagcggatctggctcattactggccccaatatggcaggtaaaagtaccttcttgcgacaaaacgccctaatcacaatcctcgcccaaatcggatcttttgtacccgcagcttatgccgagatcggtatcgtggatcagatcttcagccgaattggtgcagcggatgacctcttccgtgaccagtcgacgttcatggtggagatgttggaaactgctactattcttaaacaagccacgcccaagtcatttgtgattatggatgaggtgggccgaggcacaacgcccgaagacggtacagctgttagctttgcatgcctacatcatttacactatcataaccagtctcgggtgctttttgctactcatttccatgcccttgcggatatgacggaggactttgccaaattggcgagatactgcacggatgtgaaaactacggcttcgggtgccttctctttcgtccaccgactgcggaaaggcgtcaatcgccagtctcatgctctgaaggttgcccaactggctggtttgcctaaagagaccctcgagcttgctatgcgggtccgccaggaaatgaaggatgaaattccaccatctcgagttgctgatggggatgaaccctagcatcagcgtgctggaggcgaaatgttgtggctaatgtgtatcacttgaaggtactatgtaagatatttatgtacaattttcggcttctcctgttaaagatcccactaagtcagaaagcaaggttggcaaatgcctcactcgcatctttttttttcaatccaactgtcggagtcttcgctttcaccctaggaacccaaattttgcgattgtttcgtagacgttcattcacacatcaaagcttaggtgaccacaacctcggacccttctcaatccgaccgtgttgaccctcgcgaccaagatcaacaacaagaccctccttaaacgcaacctcctggcaatcctcacccccaaccccattaacaaactgcacaacaacgaaatcaatcctcctatgacccaaaactaccataggggcatgccacgtgccaacaccataagtcacagcctgaccaccacgcgccacaaacgccttaatattattcagatccggcgggtcacgaatggtgaccgtctcgccggcctcattctccgcggtagcagtcctccactttagagtgggggcaaccactatcaaaaacaacggttcttcctcatcatccccgaccttggaatgggcggataaatcgaccgggatgaaagtttgattagtaaacgggtggcgctcaaggatccgcacgtcaaagacctcccggtctggcatctgggggccgccgctgacagtgcgcaaaacgcgcgggaagcagcaaaacatggtcatgcgtgcctcggagggctgcccgcttggacataaattggtgtatcggtcgatgagcggggagatgggactgtatttgagagcggagttttggttcgccagtaccggggttgggttatgtggcggtaggcatgatgattcaggggcgatatttagttctctcggtaatggggagaccactgctgtaccgaacggtgcgaaattctcctctgtcagaggctccggagtgagtgtgactgtcgggttggatgtgaggaccgacaccatagtgagattttaggtgtaggtgtgtgtggatatgtgtgttggtcaatcgcttcgtgttcgccacttgctagcgtgcaggtctacagcttcatgagagagaaaaagaaaggaaattggattggatgtggtttatgaagctaatgtcggcggcgtcctccggtgataagataagcggccgagaccgttttttggatatattttggattcattttcatacaacttggagaatactactcggagaactatataaaaaggctgtttgtaaccattctattttgattcttttgctttttatgttagttcaagtcgcaagctcttcatggtgtattgccacttagctcgagcccgttcaagcgtgataaaatacaccaatttcttttgcaaaattaaacaaagtctctacacataaaaggagctaattcaaaagacatcgtggcattgaagtctgtgcagaggacccttgggattttacgacaattttctcgtacccagataggcatacataggtaatacacagtacatgggagtcaccttatgatatgcatgcatacattagatctatcaatgtcggtgtaagagccctatatgcatttcgatgtacaatcatgtactctgcaaccctggagtacttgaccggttattacaggtagatctaaaagacaacaggatctttcgggatatacgcggaatgacgacgataatagctattggcttactataggtccgttgctccgggactaataggcaatatagaactgcatgaggctcacacagcggtgactcaattctcgttgtcttgctcttggtcaatgctataggaaatacttagatataaagcattcctcctgagagctcggctcattctatcctccttctgatattcaaaggaacctactcgtgcttcgactctacttaggatagagtattctaagcggcaaagaaatatttccagtgcaatatatatcaaacgcaacaatgaattcttccaatcaatcttctccccagcaaccatctacccccaatacaggcagttcaactgctgccgctggaagctcatctacccctccaacaagctctacctatacatatacagagaaaccattgaggtaagacaaatatttgctatctcgcctatactaaagtgctaatacggacccgacaactcaaatagtgacgccgaaaatttccaacgaaacacagaccacatgggtggttggatcaaggacctcgaccacccggatcaattgacattgtctaactgagtaggcaaacaattccactcagctttaactccacgaacatgtcaacaatacggctatttgataggtctgagaatgatacgtgcaagagctggttcgtgcctgaaggattgtcgatgaatccactcatgcattcaaattccgaacacgcccgaaattgacaatcttattcttcttatgacgcctattcggagaaatggcgcactattgcatgtatatttggagtgggagacctctgggactgatacgaacatataacgtggttttctattctctatcctctattttctattttcttttatctttgtctttgtcctttctttggacgacaaacatgtgataggacaaaaattgagggggagagtgactagggtatgcagccactaatcgtcttgcatggtatgccagcgaattggtagatggcaacatttccgagatattcgacgccatgagaacggaggtcaacaccgaataaggaatatgatgttttagccgagcatggacattatgtgttgtctttgatgtgtttcccctctttttttcctatctcgggcaattagcctccgtattcgttattaaaatgttaatattatgcgtggtgctagtggtgctagtgatgcgggtcaccaacttatttgatttggggtggaatcatttaaacgtgcatataaatgtaacatcaagttatatgcttgatgcagtcgtgcccaaagtaagcttgtgggattttagcgtcctaatggagtcagatacagcaaggatggcatagccaagctgctagtttgccgctcactctgctaggactggaaaaagcccctagcacgtatgaagctctatccccgagccactttatgtgtaaagtataatcatttccacactctgccaaactcatacctacatgcagttatagttaaccagtagcagcttgagggaaaagcatgctcggggtaaacaactgagaacttcaccttccgggggcctcgaatccttctacaagagtgatctatgagctaacgacttggtatcgacacctctctctccgatagaacaagaaaatacgtctttggatagaaacccgatgacgggtattgattgatcaaaacgggcagactatggaatgaaaggcctggatgatccttagttagacaatcatatattcgcttctggctttccattcccctgcagggaatcaagtcttcgctttcgcatcccatgtaagtccattcagcgagcaataaattcgatctgctcgccttttaccgtcaccgccgaaaggattcattttattggaacataaacccgagcgatggcaatcgctaatcgtttcccattgcttgatcatagtatagatgatggcagggctggactcccggatatcgacggtgactgatagagccggaccagactcaaataagtgggccgtatcgatcaagcaagatatcttccttctgatcaatttaccgagtgtgaggcctaggtgtgctgcatcgcaactctcagaacactgagctggacctttcagcagtcttgaaatgtgttctttgatcattaattcgaatttttcgatgcctttctgtctacattgatcaattttgtctagaagtgcacgattagtgatttttcacataaatctcatctcaaataaatgcaacgttctattttgttcacatgcctttgatggaatttggaatcgggagattgcttgtgtcaaatggccctgttgcttgctgtatggcaatttttgttgttttctggaagatcacagagtgggaccggaagacacaggagatcatcatccatattttcatgtcttgtgaaaatgaagacggaacaagcgactccagggcttgtatccagattccagcaaacacttcgaccacctcgttgcattgaaaaaaatcagttgccacggcgatatcactcaattgtggtagggtcagcttcaggggaacttgtcgtgaacgtccatggatgaggttcaaaaggaccagaaggatatctggtttgcagtcgttgacgggaatctcaacggatcccttctttgaaagagcactcccttcagcccaacaatctttcagcagtcgcttgaaataagccgatgctagtgctaggtgcttcgatgagacttggaagcgagcgtagtttcccggcacattgcctttgctgatgtcaatcaggggggtttttggtgtgaagagaataatatctccatccggatcaacctgatagggcggatgcaagtcaggtgccactacagcagtcaatatgggtttagtgtcctcctgttcttgagtcgaagccatgggtgtagccgatgttgactttctcaaattcaagccacgcagtgattttgtttggcgcggtgccattacggctgtaggtatgttgagggatattcaacttggccaaccttcaacagagagaagagaatggggagcgagacagagaaaataaacgcgtatttatgttgttgtcggaaatgaagcgtaagcaaaatcaaaagggtcaattgtggatcatttgcatatctacagtgaagtacagagacacgttggacacattctattcctgtacgatataatgaagggtgatcaaaagtacctggttttaggcatacagagatatgttgactttccaaatattctgcaaaaaggctatacaagtgttgcccaaatgcatgggagggggtctttactctttgtatagcaggagacccaagaactagtctctttgtatagcgctccgcctataaatatgtttattgaaggaaagggcagttcagggtcaataatagacctcaggtacaatttttacatgctagcgtgagttgatcatgacagtaattccaaagcctaagctttggatcatcagtagcgcttagcacctgtgtttttgtaagagtcgactagtaaaattcaaaaggatgtgtcttggtggcttggtaagggatactcaaatgataaatccattcatatatgcccattccaactatgctatacgtggaggatgtaaataagttccgagagctaccgtagtaacggcaccattgtgatgatgacaaagcttcacatttgggagtgaagggtaacagtgatgaagacaccgcatcagaaatactctttagacaagagaatatctctgggtaacatattgtttggctctgcagcggcgcgtacatcatcgtggtgtattgagtagcgattgagtcacagcgcttgctccaaaaagtctcaactagaacaccaggggggtgtttcgagcagtttggctcacaacttatgatactcgctaatggtaagccatagtatatcaattcctgccttctggtgacagaggaacggacttccatggcagggaaagtttaaagacgccgtagcaagtttaaatcaagtagcattctctccttttgcgtcaaattttgctttcttggctcgtcgtttgatttctcttttggacaaaggcttgtcagcatcctcgccgacaggctcagaactgatagaagccttcctcttgagattgtccactccattttctggctgcacaggttctttggctttggggttattcttttgctttggcgtgaaaccttcaggtttgactttctccccaccattgacgatatccacgatgcctcgccaactggttcgcttcaacttagccaacgcggtcacttttcgcgactcttcgcagactgcttcctttccacgctcttgtgatagaccccaaacacaggcaagatttatcacgtcccacggggctcgtagacctaaagctcgtcttgcttcgctagacacaatgatgcctcgaccgcgtgtcgcgcggatcaaggatgttgcattcccaatgaggttccttcgggcgtcaagtccactccccgtgatccctggcccatagcagatctcgatgcgaactccacgtgagattgccgcagacagcatcttgaatttgaagtggtatgggagtcgcaccgagagatccacagagatcacgtcgcattccaagttggtgcatgcattcagaagtgacttttcattcgtgggacggagagcaacgatgtcgtacgcttgactcagcgcgtttaggcgctgattctgcgcaggatcggccagagtcaggttcaaccgggtcagcagttggagggatttcggcgcgtttgttggaagcggaggtggagcgaggcttggggggagcttcccgttgattgtttgagatagggctacggtagtgtaaccaactaaacagtcaggtcagtccctcatgtgctccaacctacggatcttgtgccgcagagcggaatgaatgacttacgctcggcaaggaaattcagagtatggggcacctccgggtcatcggggctgtaaggtacattcaggtcgtaaaacatggtgaatttaaaggaaggtcagccctgcccgtggaagttattgctttacttctcagcgctcttggtcacgtcgaactgtcccaaaaaggcaattagaaaatctatcggattaacagaggatccgtcagtgcactaactgctttaggtcgggtccccacaaacctctctgatcccgtgacctcaggcggaaccgatctcgttctactgatcatatcacgacaatatctcacttcgtccatcccattgctcaaggcttcttgtgagcactgtgtttgggctgaatagtcgctgggcctgttgctacctgtctcctacgtctacctaatccccgaccccttcctccgtcgcacggccgagcccctcgtgaccccgccgcacatctttcaattgtggccgcactcggaaaccgcctgtcatcgtcaagatggcgcgtgtctatgccgatgtcaacgagcatatgcctcggtcctactgggattatgatagtgtcaacatctcttggggtgtccttgaaaattatgaaatcgttcgcaagataggtgagagatgatgaaacctgtccttctgcagcatgtcggagatggttgccgctgtgagctgcgggtgaaatttgagaacaagctttctgactttctactttaggtcggggaaagtactccgaggttttcgagggtatcaacgtcgtcaactaccaaaaatgcgttatcaaggtcctcaagcccgtcaagaagaagaagatcaaacgtgagatcaagattttgcagaatctcgcgggtgggcccaatgtcgtggcattgctggacgttgttcgcgataaccagagcaagactcctagtctagtgttcgaagctatcaacaacaccgacttccgcacactgtaccctcgcttttccgattacgatgttcgcttctacgttttcgagctgcttaaggcgttagacttctgccacagcaagggcattatgcatcgggatgtgaagccccacaatgtcatgattgatcatgagaagcgcaaggttagtgggcttatcaaatagttgtggcggaaatcatggatctaacatgttatagcttcgtctgattgattggggtctggctgagttctaccacaagggcacggaatataacgtccgtgttgcgtctcggtatttcaagggccccgagctgctagttgatttccaggaatacgactattctttggatatgtggtccctaggggctatgttcgcatccatgatcttccgtaaggagcctttcttccacggaggcagcaatacggaccagttggtcaagattgccaaggtccttggtactgaagagctgtttgagtacttggacaagtacgacattgaactggacccgcaatacgacgacatcctctcccgtttccctcggaagccatggcactcatttgtcaacgcagagaaccagcgtttcatcagtgacgaggccattgacttccttgacaagcttctgcgctacgatcatgctgtacgttgtgattaacatctctataaatgttctatgctgacttctcaaaggaccgcttgactgctcaagaggcaatggcacacgcatactttgatcctgtgcgtgctgatgcagctgcccttagccacaacaatgtgacactcccctgaattcctctcgcatgaactgttcatgatcatggttctgatccttttactgcgatgcccggcttccaagttctccgcatgctgccatcaagattttgtcgggcatcacaataattacgtacctcttacatttgaaatttgctgatatgaacggcacaacgatgatcgaaaacatgaaatggcttgatcttcgtacttcctgttcctcttctcactggccgttcgatgatggactgcggcaaacgatcaaatcctgaatgaagacgactttgatgacaagacatcatgacatttaatttgctggttccctccaagcctcttatcgcctaggtcgtttggcgtgtcaatgagcgtgataaaccaacgtcttagatggggcaatcgctcttctttttcatcttttcctatttgtatagcgctcgtgggtctccctaattgatttctcccttgttagttaaattggtgttttggcctttgttttgggtgcttcgtgtttcaagggatgctttttcctaagacaacccattgcattttcttaatgtttccctttttatgaatgaaacattagacgagataaaaaagaagtttcaagagaccctagaattgcaatttgtatggattgaacatcgtaggtagggttctatgtatcacgcgtataatatggctcgacccatgtatagaatgacatggtataactatctagactcagaccatgaaacagatatcaagtatgaataacctccaattcagtaaataatcccaatcttcctcttccaatccggttcttatagatgtagcctcagatcacccgttggctccagcgtatcacgtgaggattatcgcaatgtcgtcctggccgaacaaatacaagaaaagacgaattgtaacaaagaacacgcgaagaaaggaacgtaagatacccaataatacccaatgagtgttgactcatataaacacgcttcattgacctgcccgccgactccaccgaacctcccaccaagccccgcgctctcattcgttcattcagcgttggaaatttaattgcccgcatttcgcacaacctcccctccttatacctctccatctctcaagatacttatccggcgattcgtggcgcgatcggcgccttggagatttactcctcaatatcgtgcattctccaggatggctcaaaactctgcctcccaaacccccagtgagtttcatgactcattctcagatgtcgcagaagcttatagtgaatagcgggtgagcctacggctccaacccctcaggtcgacgaacagactcgcgccgagttcgccgatgttgccgcaaaggccccccagaatccgcagggcggaccggccggcgctcccaaggtgaagaccgagaaagagtgtatgttaccaccaagatctatattcggacctttcctcggaagtcgtttttgtataatgagtatttgctgatactgtgggtgattcctagtggaaaaggaacgcaagaaggccgaaaagaacaagaagttcgaagagaggcaggcggccaaggccaaggctgccgccagcaaggccgcagctcctaaagtcgagaagaaggtgaaacccgagaaggacaagaccgccgatgcctacgatcccatttccatcgaagccggtcgtctcgaatggtgggaggagcgtgatctcttcaagcccgaattcggacctgatggcaaggttaagccggaaggctccttcgtcatccccattccccctcccaatgttaccggttctcttcacatgggccatgcccttaccaacgccctccaggacaccatgatccggtggcaaagaatgaagggcaagactaccctgtggcttcccggaatggaccacgccggtatctcgactcagagcgtcgtcgagaagatgttgtggaaaaaggaaaagaagacccgtcacgatattggccgagaggccatggtcaacttgatctgggattggaaagatgaataccacaagaacatcaagaacgccctgcgcagacttggtggttcgttcgactggagccgtgaggccttcaccatggaccccaacctgtcagctgctgtgaccgagaccttcgttcgcctccacgaggagggtattatctaccgtgccaaccgcctggtcaactggtgtgtggctctgaacacctctttgtctaaccttgaggttgagaacaaggaaatcgagggccgcacacttctcgatgtgcctggctacgacaagaaggtcgaattcggtgttctgactcacttctgctacgaggttgatggaactaccgagcgtatcgagattgctactactcgtcctgagaccatggttggtgataccggtattgccgtccaccccgacgacaagcgctaccagcatttgatcggcaaaaacgctcgccatcctttcttggaccgtctgatccctatctttgctgacaccgatgtcgaccccgaattcggtactggtgccgtcaagatcacccccgcccacgactttaacgatttcaaccgtggtaaggcccacaacctggagttcatctctgtcatgaacgacgatggtaccttcaacaagaatgctggtccctttgccggcatgaagcgctttgatgcccgttacaaggtcatcgaagaccttaaggagaagggtctgtacgtcaagtgggagcacaatcccatgaaagtgcctcgttgcgccaagtccaacgatgttattgagcctatcatgaagccgcaatggtggatgaagatggaaagcctggttcagcctgccattgatgccgttgagaatggcgatatcgttatccgccccgagtccgctgagaagagctacttccgctggatgcgaaacctcaacgattggtgtctgtcccgtcagctctggtggggacaccaggctcctgcttacttcgtcaagattgaaggcgaggatggcgatgacagtgacggtaacctctgggtcactggccgtaccgaggaggatgcttgcaaaaaggccgaggagaagttccccggcaagaagttttctctggtccgtgatcccgatgttctcgacacttggttctcttctggcttgtggcccttctctactctgggctggccccgccagactcacgacttcgagaacctataccccacctccgttctggagactggttgggatattctcttcttctgggttgcccgtatgatcatgctgggtattaagatgactggtcaggttcctttccgtgaggtttactgccactctctcatcagagattccgatggccgcaagatgtccaagtctctgggcaacgttatcgatcctctggatgttatggagggtattcagctgcagactcttcacgacaagctgcagttgggcaacattgccgataaggagattgctgctgctaccagataccagaagaaggcattccccaagggtatccccgagtgtggcgccgatgctctccgcttcgcccttgtctcttacaccaccggtggtaggtttcatctcatgtccttgtttgattccatttactaatcatgatttgcaggaggtgatattgctttcgatatccaggtcattcacggctaccgtaagttctgtaacaagatctaccaggctaccaagttcgtcctcggcaagcttggcgatgacttcaagccccaggctggtgttaagaagactggccatgaatccctttccgagcgctggattctgcacaagttcaacatcgccgccaaggagatgaacgaggtccttgagcagcgtgatttctccaactccgctcagatctcctatcagtactggtactcccagctgtgtgatgtgttcatcgagaactctaagtacttgctggcggatgatgcctcggctgaaaccaaggagtctgccaagcagaccctctacacggcccttgagggtggcctgaccttgatacaccccatcatgccgttcgtcaccgagcacctgtggcagcgtctaccccgccgcgaaggtgataagaccatctcgatcatgaaggccaagtatcccgagtacatcgccgaattcgacgatccggccgccgccgatgcctacgagctcattctcaacacctccaaggccatccgctcgatcctgtctcagtacgacgtcaagacccagggtgatattatcatccagacctacaacactaccagcgaaaagaccgtgtctggggagatgaccaccatcaagtctctgggtggtaagaccctcggcgagctgtctcaccttggcccggagaacaagaaccctccctctggctgcgtggtggctgctgtcggctctgatgccgctgtctacctccgtgtctccaaggaggttgcgctagagcaggaagagaaggctaaggctagcctggccaaggcccgtgagactgttcgcaggtctcagggtattatcaacggcgctggctggaaggagaaggtcaaggccgaggtccgtgagcaggaggagaagcgtctgcgtgatgctgagggcgaggctgcccgtctcgaggagcaggttaaggagtttgagaagttgcgtctggagtaaattgtccatcattgggtagagttaaacaaaatacatcaatttattcccctctttcaaccgtgcattcactgttaagtcgtatcccagttaatcagtaattacccatgtaaggttccaacagtaacctgcactccggctcgcccagaaccggtgcagccgatgcgatgtgcatctgatttatatatgatatacgagtcattaatcactttcattcgacagcatccgatgttgtcattactattcctattgcgaattcgggatgttttctgcagtccgtagagatgcgctatacgaagagattatcaaacttcgattttctattacaataatattagcatctttgcaatatctcatttcattgcagtccatttatgtagtatatctgtttcattggtactttttccaatacatccatgtggagatatatattattggatggtatagcaagattatacagcgtggacaatatcaaatatacgcgattgatcttaggagaggaaggttatagttctgcatactaaaaacaaaagaacttcctatattcgatataagattcaataaaaagacttacctctgctaaacatttaaatagcaaaaagaccaaaaatagtttccctgggaatcgaacccagaacctttccggaacatcagcgaatcgcatttgttaacggaaaatcataaccgctagaccaggaaactgctcgaccactggggccaattgatgaatggacaggccattattggcctcatgagtctacaactttgttcccaattatttaggtccggagtaacagaacgaacttgtttcgccaaccttccaacattcgaaagtgggcaatactcaatccacagcggcgagactctcaatggttcttaatacaacggagtattctgctctgcataggaaccatctagacccaatatgaatcgaggatacattttcacttatgaataccgtatgctgccgagcgcatattcgaagctcaaaactacagtaacctgaagcttaggagtatttaccaggtcttgaaactacagtctaccccttgtggcttagatatatgtggctgaacccgggtaaccctatgtcaatacctagtcggccattgcctatttaggtaacaaaaaaatgactacggagtatgccattcgctatattccgcgtatctatggcttatcaaggagaaactaacagactgtgttcgaggtcacatgacctctccgctctcccaacaaccatttagtcccagcagacctccccacgcaactcaagagattttctagaccacctacgttttcatccgtagtactctagattcaatctctcacacctacgttgtcgtaaagcaaacagccgatggaagactgaaaagcaaggtacaagtgccaaacactttcttcatcgtgcgttcttattccccctccctttgctcttctattctcttctttttacttagtatctcttgcattattacatacatgagtatataaattcggcgaccaaaacggtgtccatctactcaaagagcctggggattttgctcaggtgatctgatgactggacaagagaggtgttctgggatgaagatgtgttgtgtgacgctgccgacgtggcctcctgatgagactgtctaggttcaggacctgggtcgtgtgtacaagttgatggattcctgaatgggagaggaaagaaggccgtgtgggagatttcaatacgcacttcccacaattgcgagaatggaaatgaagacatcaaacttatgcgttagatgtgattgagaaagcaatatcaacgatttttactattgcagtgcctaggccaaacctgcaaacattaatattagataactgatttatgtttctgatctcttcgaactcggcgacttcaatctagctttggtaggaactatgaaataagaaatcagttgcaaataggagaaagtaagggcattagtcaggtatatcaactcacgtccaacctttctatttctttcctcgttgctgagtagaagacatacggttgacaaaacgaatagcagatgtatatagggattagatctaggagatgcggcttagagatttctctgtagcctccggccaagaactcttccaagtccgtccgggcaaccccaaaaaggggaagtaagactggaaagtaaataaatgaacgactgcggtaaagttctgagagaaccaaattactcaaaaagcaaaaacatacaacagtgaggattcgctggtggtcacccacccaactactaactcaccggcgtgtggcttgagtacggctgagcggacgggaagccctattttccacaccctatggtcgtatgtatttggtatagcactggagggaagtatataatagctgataactatagactatagccgtgggtggatataacacggcttatatctcatcgttaccattgggtcaggtgacctctacgcctatatggtcatagcgttggatagatacgttaagtgctctcatgtctcgttaagcttcatttccaaaaagttactccatactccgtatattatatagagttctacaacggggcctaagatgaccatggtattgctatacttcattcacactgataaaacaaaagcaaaaaacatacaacagtgaggattcgctggtggtcacccacccaactactaactcaccggcgtgtggcttaagtacggctgagcggacgggaagccctgttttccacaccctatggtcgtatgtgcttgatacgacaacagaggggaacatagagtaatgaagtacaacttcgtaggtggtgaggggtgaggatggatgagaaggatgagtgcacaatgatggggtgagaagaggatcgatcaccctcgggcgaccgccctacccccccttccagctgaattgccgcgcctcaaccaagtcgagaattttagaaaactcctatgtgcttcgcttggtctaggtccttgaagtctggaggtgcttaaatgtgaggacgtagtcgattgcatcaagcaactgcaaaaagcagttgtagtttctgcagctgatcttttgcccgcacagccgcgaatttccggtcccattcagcgcattgctcgtcctcgatggtttgcgcagccgtccccttggctcctggaagtgtagagatacggtctgcctcttcgccgtggcgaccaagttccagataccgtaaatcggctagagaagaggaggttacattcactaggagagaatagtcagataggaaaatctgttattgtggacagtggacatcgtaccttgcgttcggttctttctcttatcaatatcaatggcaaaaaaaaatagatcagcacatcttcatcttcgcagtcgtcatcatcgtctatcaagtaatgacaatactgtgggaaagctttggtgtcaaacaggaagctgtcgcttaggacgacattcgcaggtgcattcttcagaatatgaaagtcaagagggtaaggtgaggtaaattcatcatcatggccaaaacgccattcaacatcataggccataccggccgtctcagtgaccgaattatcagcaaatttcagtcttgtctgatactcatgtctagtgtgaatgtgcaccccaatacttcgtgcgtaagccttgtccataatcaatacctttgagctagaatcagccagagcactctgtacctgaccattaatcgacccctcaaacattggggtagatgccccaaggtataacagatggaactgcgagatacctttggcgaatctttttttcacacgacgatagaaattgacaacgtttgagaacgtccgagtgagcttcaaaaatggcttcccaatgatcacatcgtggatgcagttggggagaagctggaattcaaggttgtgcacctcgttttcgctgctgagccggaatggcacagttgcagttcccgtagtcgtcacttggttcccactgccgatggtgatttcgcaagtggcattctggcttattggtaatcctaagctaatggcatatttttctttcatgaagtttctttttgccccgtaatccccaaccgcgttggtggaatgctctgcgagttgacaaggtatttcgaagatgcgcaccccgcgattagtggaaaaagcactttttgagtccgattcttgtaacatatatggccgacctagagtctttatattttcaatgacccaactacaaagttgggtttggttattgcgtatacgtttgtctttgctctcagtattgcgttattgactaatgctaggagaatggaaatatatggtgctacagccgcttatgctgcagtattagttgtgtctttttcaggaaattcaggggcagtactagcctgagccgtccagttctcgccgttctcactctctcgtcctattcacccacactcaccctaggagaatttacgttacggatctaaagttcttgagggcgcatatcaaattaaccgaacggactatgtgctatatgacctatgtacggccagtaaccaggtacggcccgagcgagatcctgcgggcggtaggagactgcagtgtcgatgatcaaagctgcagagaccaatcaatattaagacggaaatgaatatagatctgtgattggagaaaatagatagcacagtctaaccttttggggataggccgtgaatcagaactcttccatgttagtcgatcttgaatttataagcagtctttgggggccaagtgtagatagatatttagcggggtttcaaagctcattttgctttgcattctcaaagtcctcataccctaaatcttccctgtttcactttcacaatgtcggttggtcctgatcttgatgatgacgctgtattgaaatggctcgaagcggtaaggctatttcttctagcaaatcgcagcacaactaatttacagcgatatttagttccaccgagcgagcgctactctcaacaccgatcagtggcttgatgaattcatgaccgacgatgtggaaatgcaatatgcaaataaccctgtgatcaagggcagcgaagtgcggcagatgttcaaagccgtcctcggccaactggacatgatgacccacgagatccgctactttgactatgtcgcccctcgtatctatcaagccgcaaccatccgatatctcgtcaaaggagacagcctagacaccgaccaaatcactattccaggctttgctgtcttctccattcggagggacgatgacgggcgtgtaaagtgctaccgggcagagacattcctggaaccatcggcattgtttcaacgaatggctgaaaaatcaagccaaccttagaatattcgtggtaggcatattggtggttgaggtgatagacttgatatctagaccattactgcatgtatccatgtttgcatggtttgttgttctgatatatatttctaccatacaccaatgatctatttacaaatatgccaactcgtctgattgatctataaccaataactctgctttgtccacaattttaaaaaacgatgctattcccagatcaccccaccaattcatctgatctctgtacatatatcctcaaggaagtttcatttgatatagtcctcggcatgtcagattttaatttccttacttagttatgtggtttagcgtagtaatttttaatgccaaagactttcgtctttgtagaatttacccgctggccttgaatatgcatatgccgtgatgatatgggacccaagttttgctattttgttgagatgctaggtcttctactacttgctgctgaatgctgctgaatgctgcccaaacaggtgacggattcaagtcataagctaccttaattccaatatagtaaaaagatagatgaagtgctagagctgtaaaaatgcgaatcatctttaagtatgacaatgcagagggttctacctactgctctataactaccctatgactttacaatcctcttctactggtaagctcatacatacgaccatagggtgtggaaaacagggcttcccgtccgctcagccgtacttaagccacacgccggtgagttagtagttgggtgggtgaccaccagcgaatcctcactgttgtatgtttttgtttttgtttttgtttactcagtatagcaataatagcatgttcattttaggctccgttgtggaactctatacaacatacggagttcccgtcgcaaatgaatgtcaaagctgagtggagaatgagaagaaaaaaaaataacgtattcggtaagcgagctgcgcaccccaaccaacccattgacagttggaccactgggccttaaggtagatcacaaaaattgggagttccgagtgccgttgcgaagaacagcctggggtgatcattcaagcggccactcaccatacctatgcgccactacatttttatagacataatctcattcctcattccaaagccccgtcaccaatgaagcttctttgtcacactcccaatatacataaaaacccattctttggcgtgtgtatttcattctctaagtgagcgtacgctgcccacgtgatgttgacaacacacgcaggtaggaaaagaggattgaatgattggcgtcgggttctcacatgggcattagagctctacttggccaagacgatgtggccaatgctagggatggatcacatagggtgaagtcgaagaaataaacgcaattcgaataaaagatccggtgagacagttgtgacagtctccatcggatagcttatgtgccatacttaggcactttctcggtgcctcctcgtccatactccggggctgcctagcagtgattcccaacaactccttgcatccgttgcattgttatatcgtggcttggttccctaatgactgcaagtatttcgtcctgtcacaagtaccccatcgacgatctcatacataagcctggtaaccaaatgaacagtcactaccagccagcgccctccacttcccaaccccgctaacccctgaatgacccctcgaacccccaagtgctgaaaaaaatcgatcccgcaatcctaagtcaccatacttgggaccagaggagttcatttggccggagtgattgggcaatttgcgggaaggtcttatgcaaggagtgatgggttaatactcatattgatgattattgaggttcacgctgctaggagcggcaaaggaagtgcctagaaactgggtgtaaagttctgtctcagtggtatactctcagtacagccatgtaagggaggtgcaacgttacaacaacaaattctaacgagaaggataagatctgtgccgaggaatgtaacatcctgattatatatataaatattgatgattagtccgtgagttttctactacaaacaaagcatgacgatcaaacaggaagcgcaagtggtgctagcggaccctgctctgcttgaaaaaattgacaaattattcgcctgcaatgtgggagaatacatcaacctaccacaattggtcgttgtcggagatcaatcgagcggaaaaagctccgtcttagagggcttgacaaaattgaaattcccccggaacagtggtctgtgtactcgatttgcgacgcagatcatatttcgcagagatcctaacttgaaagcgcggataatcactggttccatcatctcggcaggacacgagaatggaaatgcaaatgctagttggagcagatctgaaattgagtcattgaatgagaacgaattcgagattatgatggctgaggtgggtcgatattctccctgaacataacagtcaatgaaaaaaagttaagcttctctcaaggttcatgtggcgatgggcctatcagcgtcaatggaggacgaactgcctacattttctgccgacgttcttcggttgaagataattggacctcatgaggatcatcttagtgtcattgatgttcctgggattttcaaaacgacaacacctggcttgacttcaaagtcagatatcgcccttgtgagggacatggtgctcaactacatgcgcaatcctcgatcaataatgcttgccgttgttccagccaatgtggaccttgcaacacaagagataatcgaaatctcgagagagctagacccgaatggaacgagaaccttacggatccttacaaagccagaccttgtcgataaaggtacagaagacaagatcattgaacttgtcgaagggaagcaagagtctcaagaattaggctgggtggtagttcgaaaccttggtcagaaggacctccaggactcttcaaagatccgtgatgtcgaagaagagatattccgcaattcgcctccttggaaccgtatctcaaacgataattacggtatcgaggctttgagaacgcggttgcaagcattattggcttctaacgtgcggcgagagtttccgtcggttagttcttctgaagtactggcatacaacgtctgatccgtgaatgagtgataggtacgatctgaagtctcgaaacgtctcaaagaatgcaaaagaagccttgcaaacctcggagaagagcgtgaatcccccgagcaacagagcaaatatctgctcgaaatcgtgtcaaagtttcagcgtatcactgaggatgctctccatacaaactatggatcgcaagatgcttttgacgacgaagctgatttacgattggcaactctagttgccaatcgtaatgcacagtttcctgatgacttttcttctcgcggccatgtatactgcttcaactcgcatggccatgacgatgactctgaaaatcaatcaagcaccactgcgacctctgcctgcgttggcatagactttcacgaagtcgaagaggaacgggagaactttgtccccaacagaaagctcaataattgcagcgatatcgaagacattcttcatgaccctgttcaaatccaaaattctctggaaaagggtattctcccttggatcgaaaagctctatcaggaatcccggggctttgagttgggaacattcaattcggccatcctttcaaccgtgctgaagaaacaatctgccagatggcccattctggcggaaggctacatttgtgatgtcatatctatggttcacatttttacgcgtaaggcattgaatatatcctgtggagatcagaggcttagtcaaaacatcctctcatttctgatggaagacctcactgagaaatatcaacaagccctttcaatgacggattttctccttcgaattgaaagggaaggaactccaatgaccctaaatcattacctaaatagcaatttgcaaaaatggtgagattcaatgcccattatcaattataaatcgctaatctctttttagtcgccaggaacgcatcacaactgcagcccggggggtatcagtagccgccaaatctgaggaccagcctagaaaccactatgttcggctttctgaccttaagcaaatttaccacatgagtaatttgcaacaaactgtgcaagacatccatgatatcttgaagtcgtactacaaggtcgctcgaaagaggttcacggacaatatgtgtatgcaagcggcagactaccatttggtaaccgggcctgcagcgcctatgaaactcttctccccttcctgggtctataacctttcacacgaacaattggaacagattgctggggaggaaatatcggtccggaggaagcgtcgtcagttacaaaagcaggtgaaggagctggaaactggtcgaaagattttacattaacgtgagtagagtaagttgaaatacagtctatatactagaaaactcaataagaatcagagaaggacgagacagtacagcgggtggggtaagctagggcttaatgtggcgccagattcgtggaaataaaccagctctaacactaaatcaaaagaaccgttgaatatgtagggcggaatttaaagaaaggtcgtgtagctagactcttagccttccaagtatatccatctccggttgatgtacgaggtgacgacaaagatgtcggaatacatgggaaaatattaatcaatagaacatcaacttcatcaatagtaacacatcaaagggactagttaggcatgctatttctaccatgtctgcgtattatgcaaacgtttgattcgcagatcctcaccgccatttgtgacagagccattttctgtagcctctttgtagtcattgctgtgagctccctctgttaggagaatgatgcgatccgagataatcttgtagagcggatgctctgttgttaacctcttttctgtcgcttctaacacgacttggtaggcattgattgccttggcttgctcctgttttttctcccataccttgcccaaactccacattacggtagcgtagtcggggtgctcgctaccttgaaaaatcttcatcttctcgatggtcgtgataatcagtttcacagcttcgtccaggcgaccctgacgagaataagttcgagcaagttccctgcagcccatcaaaaccccaaggtgatcttcactaagacttcgtttaccagcagcgatgccctcgatgagaatatcctcggatttttgcaactctcccatttcagtgtatatcttcgctaggtagcatagcgcctagagagtgtaggggtgctctttgcctatctgggccctacggccgttatagacttcctttatcaaggatattgcgtcatcaagctcttttagatcatatagggccatcgctagattgttcttcgtttcaaggacccttaagtcactctcctctagactttgtattcgaatttccagaaccctctgatgtatgtctctactctctctaaaccggtgctaagagcctaatgtgacacctaagtgatcaagcgctttaagtgtgtcgtcatctccctcgccaaggtatgcctgcattttctcggcagtttattgctgaagttgaagagctttataatattgtctattgagccagaaatagtgactaagggagtccatagctagtagagttttacgataatctggtcctaagaatctctgttgcgactcgacaacctgttcttgtaaggctatggcttcttttaagtgccctagatcccaaagtatactggccaatcctaatattgtgtttattatctttgcgtcgttcgggcctaaaagcgtaaccagcgactcctttgccagaaaaaggtaatatacggacttcgagaaatcacctttctcggcgtgtagaatcccacactttgcagcgttttgaatcatctcttgaattgagaacagtaaagtgggctggaatagtaacgtaaatcgacggtattttccaatgtgtagcctagagaattctctaaactctatcggataggcctctagacattcgttaaggtgaggaattagactcctccgaaaaatagtgtgggactcccccgtttccatcggagggagtggtatggaggccatgagtgtatgaaaggaaattattgcccagaggctcttctccatagggggtatgcggtctcttgcccaagcatggaccaaaggatgtaatgagaaactctgttcgtcattttcatatgttattaatgaggacgaatacaactcgcgaagagcctctctgatgtacaatggatgcatatcatccgcgctttgcttgagtattcggggaagtgcccgaggtggtctgaagcgactgataatagcttgtacaaatccttcccgaaggggtctggttagatattgacgcaactggcttcgcttaaggctcatgcctctttcgaagatattaactcgtatattatcaaagtgatagaagcttacaatgttgaggatctctactgtatcttgacttgggatcgtattattggatacgatgtgttggaatgaaaaatcaaacgcggaatagatatcattattctcgactttcccaccgataatatcttcggtgtttgaaacggattttcttctctggcgattttttaagaagcgtctgtaaaacccgaggtactcacttaagttatatattttgttgtaaattgagttgcctgcctgaatgactgtaagggctaaatatcccagtgtcttgataatctcgtttgctgccgtttccgaggataaatcccatggcggtataatatctacaactttcatgagaaggtggagagcatctctttgcttgagacctttgacctccatactcccgacgttaccttgcctttgaagactgggatttcttgtagttacgaggatatgacctctttctctaggcacaatgaagttttcgaactttaggtcaggcttgtccgcgttgtcgattatgagcagccaattctttcgagcttgggaaagaaagtgtttaccggagacttcggtggcttcgagaccccccatacgtccgactttacagaataattctttcgcggtttgggccgaagttgcatcgatagtgaagattgcctaataactgaacaaagaatatgtcagtgagcgagattcgatatttaggtgctcgaatacttactgttgtcggttgctttgggcatattttgcagatatttgtgtcttcccagatcccccaattccatagacgacaaatcgcttttgctgtttatccatcaatgtctggtcttctggttcaaaggcaccctggagtgcattcatgatgtcctcctgacctataaaatccatggaaacggtgtatggtgggtggaaatgttcattctgcaaagcggcttcgatagcttcagtattgctttccgtggggatcgggactttatccggaatttcaagaaacaggcccgttaattcacaggcttcgtttcttcgcatccgcatcattgatcccattgcctctttccatcgatatgtgacaattgctggagccgagtagcagtacttcatcagggcagatataactgtccgataggcagagtcagattggtgaaacttcgtcatatctgagtggttggagttcggaattccacatctttctgtatcatacagatgtggagcggcagaggacgggtctaccataaactccgcgccgctcgtaagctgtgttctcagcccctcccaaaaaaggtacatgtggacctccttcatgagtggagcgaactgatttgtgatgatgtctaaggcatgcacagtgattggcatttcaggcatgctaattctctccttcgctcggcgagttaagaagttcgatgtcgatgacgatgtacttgaagcaatccatttcccaacatcgatctgatcatggggggtgctgaagaacaagatggcaaaagtcgagatatatatagcattgaggtgtgatgtgaaatgggatgttcgactcgctgaatgaacgagcgcactcttcacgatgatgcctccaagtctgccactagggtagttgcttgactctgaactctgtccatggagtcttttccagtataaagggaagggcttgcgtcataatcaaatgtgagaactcgtgcgttatggatactccgtggcagaaggtctctcagccacaaagtacccgtttcatgatgtgtccatgtctctaacgagtttttccccaagccatggaccgcgacgatactatagaatcctttgttagcgatgtaatacgcccaaccccatagagacgattaggacttctcactcaacaccagcattctgatccaaatctgccgcacgatggctaatgttgtgcgaatgaagtacatgaaggcctaatggcatcgcgcaaggttagatttctgatcgctgtttacagagagacatgtattgacatagcgatgataaggagctggactcctaagcacgtgcgggagttcatgatgggggaattgagaacacccgggcaaacgcatggaatgtattctgaggcatatgcacgatcgacccatcaaggttgtgatctgcgtgattctgagcctatcgaaaaggggatttaccgttttctccgcccttgtcttattctcgtgtaatataaactgcattagtgcttacagtgcatttcgcctatgaattgggcgctaacagccacctatattggaggtactatatacaaaacttcttcccagccccccaagaccttcgaaatcataacaagaattaagaaaatatgattgagaagtatctgatctgggctgtcgttacgtttatcatttgccaaatatgctatcgctcttttgcaaaattcaggagctatcgggtatgtgagaatgttgacattttgagttccattgctgatgatttgccggcgtgattctatttggggatcccaaaagggctgcgaattaccactcgaacttccaaagagatggccatttggaattgatcgcatcaaggatctctgggaaacaaacgcagaaggtcgactccttgcatatctttgcaaaatagcagaagattatgagccccagaacaacctcactcaatatctgctgtttggacccagagcctttcacgtgttacatcccaagaaccttgaggtcgttttgtctaagaacttcaaagctgactatcctccatattctgcttttcaaataaaagcataggctcgttcgctcactggtgttttttttttttatcagattatgggttcggagtcaggccccaaattttcgcgcccctgcttgggaatggcattttcactcaggaggggtttgaatggcagcattcgagagaacttctgcataaacaattcaagaatgtccaatctcagaacttcgaccagttccgcgaacatgtcgacaatctaatcgatcgtctaccctcaagtggaggtgttgatctccagcctcccttctttgatttgaccatggacatcgcaacggctctcctttttggtagatcggtctacactttgagggctggtattgaccagtatcaacataataaactctttgcagaaagcttcaacatcgcgcaagagggccttgccaagcgcttcaccttggcataatctctatagctcagaagccttccggaaagcatgcgctaatgtccaccgctttgtcgaagaatacattacggagtttgatttggagaccgtggacagcaatcaagagaaccgatatggcttcatcaaacagattgctaaggagtcgtatttggggaccgcggaaaacaacaacgagaagcgggctgggcccaacaaacaggctattgatgagtccgaaaggatgaaaaatatacgtgatcagctactggatgttttgctcgctggaagagatacaacggcgctgtttatcttggacattgtatgtatcacacggtcagagatatcttccaggctttccgctcgtgctgaccatattatgctgttggtaagtcgactacttgtccgtcatacgagtgtcatggaacgtctgcgaaaagagatctcttctgtcatggggaccgagtccataccaagtcgggaacagataaaaaagatccgatatcttgattctgtgatcaaagaaagtgagtcccaattgtctgtatttttggtgaaacaggtagacatctaattttttccgttaggcctgcgtctatatccccctgttccactgaacaatcgcgaagcagtggaaaccactattctaccaacaggtggtgggccaaacggtgataaacccatcttagtgaaaaagggtgaacttgttgtttattcacagtacgtgaattcaagggaaaaaaatatatacggccctgatacatatgaatttcgtcctgagcgatgggaaaccggcgaacttgacaatattggctgggcctactttcctttcagccgcgggccccgtcaatgcttgggggaggaatttgctcggatggaaatctcttacacaatcgcgaggatgctacagacattcccgcagattatgttgccatcgggagagccaaatcagcctgtcggaaccgaaagacagcgactaacattagttctctcgagtgctgaaggatgcagagtggaagtccttaaaagatagtcattgggaatggggctcatagagaatggatcgtatatgggcggctatggaaggaagagagatttacatagtaaggaggcaggttcttgtagacagccacccacctcaagaatcatgtatcgcgatatgtagtacaaagcgaagtgtttcaccaatcatttttcattccactagtgtgtacgctaatgcagtacaaattgggtcacactggcgagatgtccaataaaaggccaatggtaagttccctccctcatgaggggtctgaataataccaaaattgcacttcaacctaccttgaccaactctcaacaacattattactccacattcgacactcaacttgaaaatccatgacaatgagtcgaaacaaagaatttcctaagcaaatttacgggatccaagagttatatcgatcgtgtggggagccagttgaggttgagtgagtgcttagttatcattgaaatgatggatctcgttgacaataactagcattgttgccgtccatgggctcaatggccatgcgacagggtcatggacatccaagccgcaagaaatatgttggctgagcaacgcatctttcctcccgagatacatcccccgtgcccgggttttagtatggggctataatgcgagcatcttctcacagaacggaaaggcacccagcgcagacagggttttacaacatgcgcagacattagtctctcaactagaggctgatagggatgtagggaactgtccgagtctatatgaatgaagccctgctgacggttttagctcgaagatgcagcgaaaaggcccatcatttttgtatgccattccctaggcggcataatcgtgaaaagagtaagttgtttaggattgcatacaaggaagttgtaaagaccaatattgttcccttggctaaccatgaataggccttggcgtatgcagagagtcgcgttagactcactcacatatattcaatttacgtttgtacatttgctatcctcttcttcggcactccgcatcaaggatccagcaaagcgaatattcttagtagtcttcaaaagattgtatcgattgcaacccccaaagccgctatagaccttgaatcaggattggtcaatgcactcgagaaggaatctgaagtcctgcaaaacatcaccgaccaatttacaccgctcatgtccaacttccgcgtctttttcttctgggagcaagagaagactgatctcaaataaaaaagagattacatcgtcactgaggcgagtgcagctccaataagactcatcctttgcgaacctttacacaatacgtctggtctatggtatgtgtgcacgcaggcaagttgttgccgtttgtcttcaagttgtgtactactgttataatgcttgagtggtgatgaatatttcctaaattcatatgttcttgcttctttccccgttctcacattaccgaatcttgagagataccatacatctgtagatactgttgacgaaattcgtgtagcgtaatttacactagactataaaaagaacgaaggttcttgcttagggcctagaggggccatatcccattcttgacagctgttatactcaatcggtttaaccaggtgaaaccccaacctcggggacagctcgagtacctgttgcgggatatggcatttaatttgaagacatatctctcttcagtacatagtactagacccagaccacatagggtacagagtccagacactaggtatgcaattgaaactttcagactttaaataagcctacgctaaagtatctacggcccgggccgtgacggaaggcttgcagggttatttgtatgtactatagtgtacattattatcattattattattattattattattattacacttggatatcaatggaaattcctgggtttccgatcggatgggggttatagaccaataaataggacaaaaatagcaaaaagcaaaaacatacaacagtgaggattcgctggtggtcacccacccaactactaactcaccggcgtgtggcttaagtacggctgagcggacgggaagccctgttttccacaccctatggtcgtatgtgctagacatacaactagagagaaatatataatgcatgtagtttatgagagggtcctgcaaattgttggcatacaacattgtatgttgtagtcgaaaatcacgactggcacagtcgtctaacctaattaggataggtcgatcttggcactgttatttcattactccgtacactccggataacatcagccacataacgagtacttccttaatgatctcggcggcctaagagcgaagggactgattctaacttctaatgctgcgcaaagccccctcttactggcttattggctttttgcatttgataatgactcatttcacaacaaacttccggcatcatccatcgcgcaacctatggagtttgcgtttggaagtccatcacatcggcaacccatgacggcaagccgcctaatgcagctgagacttgcccgccttcttacttgtggcgagagcaccggccaggccaaattgagaagagacaccgttaatacgatgagttgagttcaggttcttgactacaaccatctggtaacaggtggccatgccttcccgagaggcgataacggaccaggagaggaacagctcccagatctagggcatgttagacttcatggaaagtactatggtagacgggggaaaccttactctataccatctggggccatatttggccttgattgcgtccacatttccagtccagttccggtaccatctccagagggtaccggagtaatgaacaccgacagtatcaatgctggtcattgtcagtaagtgcacttgcgaggacagtcctagagcccaagtaaaactcaccccttgagttcgaatccagcttgttccagacacttgacatagtaccacagaggagttgaagcatctgcgccacggaagatgtacttgttcaaatacagaccccaaatgaaatcttcgtactgccacgcctgacgcagacctgaaagctgaacatacatagcaccgtcgtcattgagcatatcataacactggcggaagaacgtggtaagcttccggataccaacgtgctcgcccatttccaactgcgtgatcttgtcatattttgtccgtggaatatcgcggtagtcgaggcagagaatacgactctgttgttcaggaatccccgccttgcggagagcgtcgttgccccaagcggtttgattctccgcgatagtaagtccggtaactttagcgccgtagttgagactggcaaatttagcgaaggttccccagccgcagccaatatctagcatggtctcgccttccttgaggccaatcttctcgcagacgatggccatcttgttatcttgcatttcttcgagggtctcctccttctccgggtctgagatgatgccggaggtatagatcatgcgagggccaagaaaccaagcatagtggtcgttaccgcgatcatagttgggacggatctgttcctcatcttgggctttggtgtggaagatgatgtccttgaaaaaggtgaaaaagatgaacttgaagaggtccaaggtaaaagagaagttcgcccagtcgtgacggtattccatgacctcaagtgcgtcgccgttgaaatccaccaagccgtccaggtacatttccgcaaatcgctggaggggaactttgttctttccgtgccatttcgctttatccgcttcgcgcttgaaggtcaagtaatattcaatgggtcggccgggtagcttgactttttcgttggtgcgggggctgctgctggatttccaggaccagaatacaaccaaaagaggaaggaagagaaggattaaaaggaagaagaatgtcttctgacctccattgagcaggtaggtaagaattgtaggaattccgacgaggacgccgcctaggagaaggttcgagaagctttcatttccggggccatccgcgggcagcggcgcattgtgaatggctgggaactatttggagagattagccaggttgaaggcaggagggaggtcaatggcatgaacacacgtttgtcagaccaattccacagtcctctccggtctggagcttcgcaggtttggctgcaggggtcttaatgaagtcgatgtcgccagacagctcgacttcgttgactcctttagcactcattgtcgattgttctcctatatgcacaatcgaggatggggaacgagaaaccatgtattaatcaaagagaagacgggaggggatatggacatcgtgttcgagggtattatagacctgataaacgcggtaatcgataagagttagggttccacatgtgggtcatcggtccccgcgggccccgttagtgtacacgttgcaggcactctcaggttcaagtctcacattccaaatgggcttgctttgtcaacaagcggactgctctcaaagacttattggaccaacttgtgaatttcaatcaaggcatagagaccgaagaggaagcccagtctgatgggttttggatctccacgacttttgtccaggtgcttcgcccgcccatggaagtttgatcctccatctattccaggtcgcagtctttaccccttgccccgaattgtgacaagtctatcgcgtttaagtgtcttcgtagcttttttgcttttcgccgaaagaattattgcaatgcctaagttgatcccacgacggcgcatggtagttgctaatccatatggcccgaatacacgtccactcgggtcattccaaagctgcccaagatgcaaagcagcctgcaagcagtgctgcatgtgaaatctgttggaccgcaggccatctaggagtgactgtcgttgttcagttcgcaacatgcaggagcctgcaataaccagaggaccctggaatatagcctcataaggtgatctagtggcctgctctgcgtatagcatgacattgtcgatatgcttctgtactttcgccaatgttacagtgtcatttaatgcatctgggaccattgcggtcctgagatagaggagggtagcctcccggcagagattgagtgctgtatcccgttgcggctgcgatttctgaccattgactgcagaatctggaggtttatattctgttattcgggcgtagagtgctaggtgcatctctaagctcgcctgtgaaggggttttctctgtgagacgtcgggcggcaagaactgctatgtcgggcagaatttcgaataagccatctgtgtcgccgaagacgactccccatgtgtcgaaatggtccattgtgccgaggatgccgtcgacgaatgtgtcttgaagcacggttcggcgattgatagagccgtaggggacgatattgttactgagaattaaaaaggatatatctccaacacaaatgcaaacaggcgtccgttgtcattgatgcttgacggtaacgagctgttggctaattggataatgatttggcggcttgcgcggaggtggctgaatattgccccttggtcgtctccagatagcgtctagacattgcattagtgagccttttgtggacgcgaggcctaagaccatgtgtttacctcgaagaacgttagtatcatcagtgtcaacaacattcggagtgcctggggtacatcgaatgctgtctggtctgaaatacgatcccgaattgtccttatcacgaccgagtaatgtctgtatatcgcgagagatacttcgagcccagggtttcgggacttcatatgggccccactaagtgctagcaatgaatgcatgagcagctcatcattgcggcacagaggtacaagtagagtcaccgacgggttattgccgtctggagaaaaggaagacagaacgttggccgtttcagttatgtaatgtgtaaagagaaggtttgatgcctgtgtaagcgttgaagctttcgttggagacacggacgaagctgtgagactcgaccattgagccgatgggtctctgggtgatgggtcgagccggtctggactattcttataaccttgtgatgcagcttggactatcaatttctgagactttgagcgcggaccaacaaccggccaggcacattgtaagctgtttcgtgtgcatccaacgcattttggttttctctcatcgcattttttcttgcgctggcgagatgtgagacaccctgtcacggagcggaaccggtgttgtttggcaggggcttggctcgtccggggtgtcgtgggctctgcgcctgtcgaaaatggcgccagcatgttgtacacgccatatgcccttgcaaagcgggattttgggctaagctggtctagaacacaagggttgagagaggcaagaagtcggctggatcgaagtctgtgtcgatctgggcgtgcggcttgaggccccaactcaatccagctcctcttttgtggcgccttcttatctgtaggggctcatgtggataacccaatatcaattcacactccagttcggcgccagcggagcggggaactcatgtatagaccgctttcgacaccgctctataccgtgcactgtaaattgaagctattcctatagaccatacaaatcatcagctgggcgtcaagaaccacctccgaccgcacaaaatgggaaatatgtatggtgggaatagcttcaatttttggactgagttccaaggttagacactttgctttttaagcccgctgtcatgataattcaggttattttgatttctgctagtctataattcaggcatgctcagtaattaggcctgaaaaacctggcattcgatcttacaattttgcccgccgcacccccctttccatattcctccacttatatacaaatttacggaatgccgctcgaaacaagacaagatcatcatgtgtggatgctagccactcttgccaactggtactgggaatgcttcgagaacaactgaacggtactaaccagcttgtccaacaggaactcaacgctgcgttgatccatggtctcctcagtagctgtgaccataagctcaagctgagatccgtgctccacagaaatgatacccagctgaccgtgcgccagcttggagctggcccagtcgcaaccagacgacgagcgaacaccgcccatctcgaagggctccgcagattcttcgctctggtggtgcacaagacaagccatttttgagccaggttgccactctgtgcaaaattctgcgattgcgtcaaacgatgcctcgtcatgggtagtgattgctaactgctgtacctggacgtgatgcaagaaatcctccaccgtccagtcaggttcaattctgattcgaacgggcagatgattcaagcagggtccaatggccgtattcgcgcccaaggaacttccacgcccgtgcacaacctgacctaaaatgatatcagatcgcgcagtttcctcaaagaggacccatgagagagctgctttcacgagcgttgacacggtcatgtccggtgcgagagagggcattgccacttggcgcctctcgactatgtcattgcctgagattcttgccttcccagtttgatcaagggggtcaagggcagcggacggagcaccttgaagatatcgttgccagaatgaaatctcggctttgttcagatcgcccattcgcctataagcgacatccttgaattgtgcagccggtgtgagaggctcattctgataggcttttttgattgtctcccacagcaacggtatggaggcaccatcatactgcgcatgagatatgcgaagaatcaaggcagagcactgtttgatgccactagtcacgagagtgaagctgactggcattataccctgggctgtagagggtggatccctttgctcagactctcgagcaacatatgcctctggatcatcacattgaacaacatttagcacaggctcaacttcccggaggatcacctggaagaaccggccattggcctctatgaataccgtgcgtaggatgctgtggtgagtcacaacctgcctgcacgtgctctccagtctatcgatttccagggctgctgggaacacttgtgcgatcgagactggcgatgaatgggttatgtaaaaaacttggaatgggagcgctgggatgatgtcttccacattatctttgaccaacgaaggtcccgctgcggagtgccaagcaaaaagttctgcatgctcgtcatctgtaatcagagaatagggtatatggtgctgcgaggaagaagctgcagtctgtatcccatctatgatatcgctggggttcaagatggtagcatgctcgacaacgcgcattatagttttccactggaacaaactctccactgaatgctcaatcccggctgcccgagcccttgatgcggctttgagagccgagatcgaatcaccccccaattggaagaagctgtcctcagcaccaatatcatcggctgaaataccgagtattttcgcccagatgtgctgcaattcccgctgcgttcccatggtgggcattcgcttatctgaaggagcttcagcgaacaatgactccagctgaacacgcgttgcgctcgccgctgagtctctcaaccgctttcggtccactttgccactagcggtatgaggtatccgtcgaagcggcacgaaggcagacggtaccatataatctggaaggatgtcgcccagttggcgtctgacactagatatctgggccgtaaagttggtcggggcaacaatatctaaggaagcgatagacgaaatcgataccggtgacgccatctcagccgatttcgaagcgacaaagacaaccaaacatttggaattcatcgaagccatcggagtcacaatctccgccacgatgtccgtcagatcttcgggccaaatctcctgcagtcgcttctcaacttctgcaagctcaaagcgttgacctcgtagcttgacctggaggtcctttcgtcctacaaacgagagagatccgtctttttcataacggacaaggtctccagttcgatacacccggccaccactagtgaggccaagacgttgcatccatgttggacatgagataaagtttgtagctgtttggtccggactgttcagatatccgcgacccaccagaggcccttgaagaagaagctcgcccacagcaccaataggagcgactcggtggggattccgtgggtcggtcacccagcaggcacctgcaatcgggaaaccgatatttccgccttgcgagttaaagtcaattggggactgcacagtaaacacgaccgtgcattctgctggaccgtaaacgggcacgaggcgtgcaaatggcacccactgctggatgtcacttgaccgaaggggttctccaccaagcatgatcgttcggagtgatcccaactcatttggtgtcattgcgcgcaatacactgggggttaaatgagcatgagatggttgtagccctttcaacgcctcggtcagtcggcctctccgctcagcctctgtcaggacgcagatgcaagcacccgcaagcaatggaccgagtatctccaaaatactgacgtcgaaagcataggaggagaagttaagcacgcgggaacctgggccaatatccatcagacgagaaacttccctggtcattgtcataaaagaaccatcctcaatcacaacacccttgggtttaccggttgagccagatgtgaaaaccgcataaagagcacgatcggtaccaaaacgggtcgtctcacgatctggcatcgatgcgcactctgagtcgatgctctgaggcatgatgacgacattgtggaacagcgcctcagcttcctgaagatgctctggcgatgtaagtatgaaaggaggctttacctcctcgcagatattccgaagccgctcttgtggatgcgaggtgtcaagaaggacgaaagctgcccctgccttgagcacggccaacaccgctaccacagtccagcaggaccgatccaagtatattggaacaaagacctctgatgaggctccctgcaaacgcagaaggccagcgatgttgctcgaaagaaggtctagttccttataggataggctgaggttggaagacgagacggctatgcgcaatggttgcctctcacaatgctgggaaatcacatcagtgaccgataacggacatcgtgacgggaatccaatgttccaggcttgcagctgctggatacctttgtcattcagtgtagcaatttcgtgcaccagtcttcctggatgatggtgcacctgctgcaagatgtggctgaattgatctagcatatgttccacttgccatggtggagtgacacgctcatcagtggacatggcaacagtcaccagatttggcttgagcataacggctagctggatggcatatgtatttgacgcagcatccccggacgatgttcccatgggctccatgggatcattggcggtgcccaagttttcaacctctcctctcccctccacaagaagggtttggaacgaacaggcctgcttggcctccgttcctatggcagcaatctcagacagcccaacttgctcgaatggaatgagctgtactgtgcgctcctgcagatctcttagggcatgtgagacggtcgcattatcatcgatttgcacgcgcaaaggaagcgtggcaattgtcggaccggccatgccctcaattccattcacagatgctgctcggccaggagacacaatgccaaataccacatcgtcattactctggtaatgggactgaacaagagcccacgcgaaacgaatggcggtggttcgactgacacattcatccatcactgggccggtctcaattgttcgtaccgtctgctttgaagcttgaggccggtatgatgcggacggaagtgcgggaaatcgctcggccgtcagtccatggaattcgcgacgccagtgttcgagcgcgtctttctgttgggacatggaatatttgataaattctttgaatggagtcatgtcggagggtgataatgcctggccctgataggcctgttgtgcacgatgcacaagcagaggcagtgaccaagagtcatacagagcatgatgaatggtgataatcaggtccagtcgctgagccatattggaatcatcgctcatgactgggacgacttcaaactgcaccagtggctgacctagaagaacgttccagttcaactttttgtgttcctccatgccccccgagatccagtgaagctcgctgttctgtaccaggacctgcatgaagccaaactccgactgaatgaatcgcgtacgcagaattccgttgtgttctgctacggtctgccaagcggtcttcaataaagacagatcaatacctggccctaaacggaagcgatggtatgcgatatatgacccgggacgctccgctgtcaaagctaccataccggcctgcaatgcggtacaggggtatacgtccgcgatttgctcaatcggaagactgcattgttccattgcctgcgatttcaattcttcccggttatttgcggggagtattgagaatggaggcacaggatcatccaattcctttggtttggagtttggccgttcctttggccccggaagcgcgcaattcagtgcgaggtcgctaagcttggggtgcaggaagatatccgagacacctagttgaatgccttgatcgctagctgtggcagccagcctcattgctgcgatcgagtctccacccaagcggaagaagttgtcgtcgggtccgactgtctccgcagggcgagccagcacttcagcccagcaagtttgcaatgcaagttcgccctttgtcatttctctcaactgtcgtaggtggtgactggtcgccttttggccaatctgggatcgtagcgcttgggatgctgcgtgtcgcagttcttttcggtcaatctttccattcaccaatcgtggtacctggtaaacaggaatgaatgccgatggaataagagaagctgggacatctgcccgaagacgtgattgcatctgctccacggccgcctcgaaggcttgaacatcgccactgtcttctggttgaacaatagaagctaccaagtgtgcatctttgggaccatttagtgcgatcaaatctgcaaagacttcggggtcgttggtagggaagcactgctgaacatggtgctcaacctcagcaagttcaatacgctgtccacgcagcttgacttggcggtctttccgtcccatgtattgtatagatccatccacaagacgtctcacaaggtcacccgttcgatacaagacgccttttctggacgcacggatgttggataaccaaatgggatatgggacaaatgccgctgccatagcctccggacgattaacgtaaccgcgaccgacaataggaccatcgatgagtaattctccgacagcacccacaggcacgagcttctctggcttgtttggatgggccacccatgcgacacaaccagcagggtatccaatgtttgattcatcctgtgagaggtattgcggtgaaggctgggccgcggcaatgacagagcattccgaaggaccgtaggcattcatcaagcgtacatgcgatgaccagcgacgaacatcgtccttcgtcatgccctctccaccaagcacaagtgtttccaaggtcgaaacatgctgcggatttagaatgcgtgccacagaaggggtcagtaacgcccaattcacttgcatctcgcggattgtatggcccagtctctgatttcggtctgtatcggagggaatgcagatacagccgccgaccaaaagcgtgtcgatcatttccacaatgctggcatcaaaagcgtaggaggcaaattggatgacccgggcgtttctatcaagacgaagtacctgggtatgtgcggccgatgctgacaggaatgactggtgctcgatgacgcttgcctttggcctacccgttgatccagacgtgaaaacagcatatgcggcggactttggattggtcgccgatgggataatgtcttttcgaatccccgaatgagacttttggctgagttcctccacgatgatgggatttggcgccagattggctgcaagttcaaggtacctcgatgaggtgatgattactggacactggaagtccacttgcaccatctcttgcagtctctctgctggatgcgatgggtcaagcaagatgaatgctccacctgccttcatgatagcgattatggcaacaattgtccatcgggatctctcacggcatacaggcacaaatacctcggggccgacaccaagcagtaccaggtccgtagccaatagtgatgataggaagtcgagggtctcatatgtgaactgaccatcccaggaatcgactgcaggggatgagggttgcgccgtcgtcattcgttgtatgtcagtgtgaatacaagatcgcacagtttgcggtaggttgtaattgaaacgaagcatttgactctgattcttccccattgataagttgatgtcgcttaggtttatgatcgtgggatcaattagctgctggacgatgtgacaaaaggtgtcggccaccaattcagcctgggcttcagccacagcgtgcgtccagtatgtcaaatcacaatcgatggtcttttcacgcgaggtgatattgatcgtgaggtcatactgtgtttttgtgagttacttcgttctgaatgaaagtttttgggggttagacagtatcctcacatacctcagttgaatcaatcccatcttccggttgcaatttaatcttttcagacttatcagtaaataaatttccggcgtccttttgtaatgacatcgcggtattgaacaaaggttgaccggagcgcctcaaagaatgcatgacctctgccaaagagcaatgttggtgatcgagactttgggcataggccgcatgattttcggcaagcgttgagagaactgatgaatcatcagccaaagataggcgacaaatcaacaaattgattaaaggtccagagatgtcgtgcgcatcttggactggtatatcacgacaagcattcagatacccgaagcatacagactcgcttcctgtgtatgcacgaagaacaacaccccaagcgacctgaagcaaactggaaatggtgataccgtgatcccggcagaatgaggagagatcttgtccaatactcatggagaatggcaacgatttcagaaagcttggggcggttgcatgctctttcagtccaagagatggaaaaacacatgggtgaacatcagtcaggtattccttccaatatgattccgaggccctatggtcccgagtcttcagataactcaggtacctgctatagctgcccgcagactcggcgtctagtgtcccattgcatgcttggtggaattcagacagtagtctttgctcagtgataccgtcaacaagaatgtggtgaatagccagctggcagtaagccccaccatcaggctcaattgcgaccgtgagctgatgtggtgggcgacccttcgtgtttgatgattttggattcaacaagaactcatccgaaagagacggaacttggccctccgcgcgcaattccgatcccgacaataccttgatgtttgcctcacaagtcctcagaactacctggacaggatgaccgtgccctttaacaccatcggcgaagacagtgcgcaagatgggttgacgatcaacaacctgctgccatgcttgctttacttgattggtatcgagtgaggagttggctgacgttgggtgcagagaccaccggatgtgcgaccagtatacttgagggtttcttaattggctcaaccacatgccgagttgaatgggcgagcaagggaacatatcttcgattccagacggagatacatcaaatcggcctgagacttgatggagtaggctgtgaaggtgctcttcgcttgcaagtgatagcaacggaaaatcgacagcggcgagttgctgttcctgctgcagctccatggggagttcctcaagggtttgttggcaattgctgatccattgatctagtcggtcctggtgttgtaattgttgattatagatgaaggacaagttgagggagccgttcatgacggttgcgttcacatcaatgagagccatgcgcggcaaatcggctgccatggggagaagggagtcatcctggactgatgtcatctgaagaagggcacctggtcgctcaaattgttggaaaagaccggtgtagttgaaaagaatctccattggggaatgactcttgaatttttccggtccttcagggtggaggaatcgtgacgcaaaatatgcccatccgttcgtggatatgctgcggcggccatcttttgtcatttgcaagatcctcctgacgttgtcctctttcttaacatccaaaaataaaggtgcaatagtggtgaaccatccaactgtgcgggatatatcaatttccggatcccatggctctcttccatgcccctcgctgaacatggtgggtgcaggtcgattttcaaaggcctgaacaaaggcgtaaagtacggctgcttggattatttccactggctgagtatgaaatgcgccatttgcagcaccaattattgcctctgttgtttcccgcgataccgtgatggttcgtcgcgttgcatccgcccaggtattcgaacccaggctagcctctgggccccaatagtccattgaaggacgtggtatttctgtcctcaacgtttcactcggatcaagagactgctgggcatagctttgttgaagccgggaccattgttggaatgatatggataggggttgtatcgtacggcccgtgttgaggatgtcttccaggtcttgcagaaggacccgccatgacacgagatcaatcacaagatgatgggccatcaaccccaagaactgctccccggcatccgtagtgataacgtcaacaacaatcatcactccctgaacgatatcaagcgtgttctggctgattgaaaaaatcttctgcaaggctttacggtcattcatagacggcactcgatgctctctaaaccgaaggcttctagacacatcagggccaataatctgtccccattggccatccgctcgtttttcaaaacgggcgcggagcattgaatgagttgcaacaatcttctcaatcgcccgtttaatctcaggaggtggaagtggtgtgtcgagccggagaatgaactcaagagtaaacttgttgtgaccatcgggcactcgctcaaagaagagcttctggatcggagagagttcaaaccacacctcggtttggtcatcctccgcggctgaggcaaaagacacagatccagaatcttggatcctttctgccagttgtctgatgcttgggaaccggaagatatcagcaacagctactttgagtccgacggtgcgacatcctgcagcaacttgcatcgcgctgactgaatcccctcccagacgaaagaagctttctgtagttccaatttcttcaacagtccgatttagtgtattggcccagatctgttgaagtttttcctcgcgagaagttgacggcgcctccggttgaattttcacagctcgatatgccttcatctgctccagggacagcttattggcgtgctcctggatggaacgtcgattggtcttcccagatggcgtcagaggtacatgcgatagaggtaggtaaaaccgtggaatcatgaaagatggtagaacatccgacatgctagtctctgctgcagcacaagcttcacgaaactcgtcggttggaggaaggaactcgacttgatgactgccgtcatcatctggaggcgacgctgggagacatataaacgctatcagcaatgcctcgggtcgatgttcattggcactgttgcgaggaaacgaccggcgaacatctgcgagggtctggctggctttcggaaatgctctatgaagatggtactcaatgtccgccagttccaagcgctgtccatgtagcttgacttgggtatccttccgtccaagatatcggaaactaccatctccggtagcttgcaccaaatctccgcttttgtacaattttccggatggaggggagccaaattgcaagcgccagggaggtgcttcaacaaagacccgggccgtctgctcgagatttgatagataacccttgccaacgatcggtccttctattaatagttctccagtgcagcccagtggcatgagcacccgatgatcttccgggtgaacaacccatccagatccacctgtgctaaatcctatatttgctggatcgttgctcttgaggtttggttggacactgaacactgctgagcattccgctgggccgtacgcgtttccaacgtgcacaaaaggctcccagcggagaacatcgctagccaaaactgcttctccgacaaacatcaaaaccttcaaggacttaagactatcaggactaataatgcgagtgacactgggcgtcaagcatgcaacgtccacttcaaagcggttcatagattccacaagatgaccgtgacagtcgtccgttgacggaatgcaaacacagcctccttggatcagtgtactgagatgttcgataatgcaagaatcgaacgctggagaggcaaattgtagcacacgcgactctggtgtgaagtggtatggcttgccatgcgccacagaacttgacgcaaagccttcgtggtgaacaattacacctttgggtgtacctgtggacccagaggtgaatgtcagatagacggggtcttgtgggctgatcgccgacctctgagatgagctattgcactgcacctgctccgggtcaaaagtatccacgttgagcaacgcttgaacgccaagctcggccgccagagcgatatgccagccgcaagtcaataccaggggagctgcaacagcttcacacatattccgtaaccgggactgtgggtgtgatggctctagcagcacaaaggcagcaccggatttcatcacagcaagcatggcaacggccatccacttggtttttcccaagagaagaggcacaaatgacccagggccaacacgatgccaggaaagatggtcagccaatgctgaagacaagtcatcgaggacttgatatgagtagctgccatcccagctactgatggccggggcaaagggctgttgtcgtgtgcggctttcaatcagagaatggacacacgggatgacatcagggcgcttggtcaagatgttctgtcgacgcagatcgctcaaatcttcggggctcacggcactgatgttggaaagtgtgaggcccggcttagtgtcgatctgctcgtaaatatgaatgaattgggagagaatccgctccatttgacagacctcggttgctgccggatcaaaagaagcctcaatccacattgtcacggctgaggggcgacatcgtaggaccagaggatacatatcatacgccacttgggtcgatcgactctgggagaatatatcgggaagttgatggccatctcgaggctcgactgagagcagcgtctggaaatgacatgctgccgctggcccaggtccaaggcgaagcagattttgcaatccgacatgttcgaactccatcgatgctgcccattcgtcctgtacttcaatcaaagcatctgcaacggtattcttcccgcacagcttgatgcgcaccggtacgctggcgagtgcaggcccgctcaagtcctgtacgccggcaacagatactgcacgacccgcgttgactgctccaaataatgtatcgtcagagccagtgtagacagattgcaggatagcccacgccaaccgaatcttggtgccaacggtgcttgaggaaccactgccagattgaatgctaaaggacctttccagccgctcggttggtctggcagaatgacccacagtgggtagttgaggaaatgccaccatcgtggcctcgtgtgcatcacggaacatagatctccagaaatcattggctttgtcttgagtctgctgtacatggtccactagtggccgaaaggggtggaaagccagttcctcgtctctgtaagcggcgtcggcttggcgcaacagcaatgccatcgaccagtggtcgcagatggaatggtgaatgatcactttcagcttatattcggtgacattgaagaagaaatatgccagtggagcccctgctctccaggaaggactgctgatctcaccgttgatgccgtcgtcggtctcctgcacctgccatggaattgatcctcgcactactgcctgcatacagccgcgctggctagtgggaatcatgcgagtcctcaatatcgggttggcttgggctgttgtaatccaggcctcctgcagcttatggtggtcgatctctcgtggcagatggtattcgtgctcgatggtgtatgctcttggatccttgaaagtgagggctatcattgcttcctggagagcggtgcaggggtatacatcttcaatctcttccagagagcagtgacattgatcggcaacttgtcgccaaatttcatctacctcattctcctcttcagtcgatggggacggaataaaggtgccttttttgaacgagatcaatgtttcctctaatgaatctcccggtggagtgataacacccgtggcaggcatatctgttgatggtctcatactgtgttcgaggtgctgaatacccataatttcaagtctctttgcttcccagtcgattaggaaatatcgctctctttttggggtctatattcacttacctgttccactcaattgtctcttgtgttattccaggttttttccacgcacgatggatactatcggtattgttactttcctatgggaatagggggtttgtaattggcaaccaagaggcgagttcgaatgagaattatagaatatcgacatccacggtacctagtgctacctacacctcagagtaatcacgttatgggctccatacaggcacaggataaacatcatgcgccctgatccaaggaatttcacataaaccatggcatatacgatttgtaaatgtaacatgatagcttccttgacgtacgtagtaaaagaaatcagcatcttttaacaacggcttcttcttttccggcgatgtctaccttgttttcgttctgccaaggacttgacatgtaaaattcatcatcgattgagctgatttcaagatgtctcacaatatgcttccgaaaatggtaatatgaaagaactgcacgaactgcgtgaactgcctaaatgggaattgggttacatccggaactccacgacctaacccacacaccttgacgtccttgacatcaccgctcactccactgattctaccattcggccaatatgagaaatcaaaaggttgtgatgacctagagactttggtgcctggctttttgattgttgcctggaatcgttcgcgtggtatcagagtgcgaagtggttccccctgattcttaccatctgacaaatgactcacgagctcctttacaagtttattcagttccctagttacacacgaaattagaaccccgaagatggtgccaaaagcccctgtttaacaaaggattttctttcatcaaaacgctgtgctgatggggtggaaatgcattctccgtcaacttccccgcagcgtgtcgacacaccaacatcgccagagaatatctccatcagttccgatatggccgcaaattcagcgaattcaaaagaagagacagccaaaccagcaagtctcggtagctatgcggtgggttatgatttattgatggacccggctttgtctgtcgcttacacccacccctctagagaattctatcatatggtacctctaatgggggtatctatattatgattttgggcctggtttgtgctatggcttcaggagtcgtgagttagagcaactgtcgagtactcaatatcaactaatgaaactccaggctcttccattgatgaatattgtctttggccagctggtcggcaaattcaatcagtactttattccaggatcaggtatcacagagcaatcattcaagtcctcggtcaatcaagacaggtagatatctcgccctctattcctcatggcagcaaacttacgctctccttctagcttatatattgtgtatttgtttatcggaaagttctgtttgacttacatatctatggtactatggctttacccctccataaccctattgttactcacacgatatagatttgtttccgattgaccagcctccgcgcctcaggggccttgcgcctggagtatacccaggctctcttttcacttcctatgagcaagctggacgagatgtcagtcggaactgtgacacatgcgattacagcgctgtcaaatacgatccagcaaagtgtttccgatcggctcgccattctgttccagtcattcgccttactcgttgcggcttacgcgatcgcattccgttattcatgggcactgacgcttgttgtcagtgcggccattgtatttgtggtccttgggtttagcctgacaatgccgtttttggtgaaggcacagcagagtgtggacaaagcggatgagaaacatgcagccctcgccgcagaagtattcggctctattcggacagtattcgccctgggtgctgagcaaccactcttcaaaaagtatacactatgggttgaggaagcacggaaacgtggcctacgtatgtctttggtcagtggagtccaccttgctatgctcttctttgccatgtatgtcagcttctccctggccttctggtttgggttgaagctgtatcgcgaagggcatattgctaatattaacaccgtgatcacgtatgatcatcctaacttcgaatctttatgatgccgttttctgacaataaatcagggtattcttttccgtgctcctcgtggtcactattttgggaggcattgcggggccactgatggctatttcgaaagccataagtgcatccggagccttttttggtgttattgactccaagccagataatatagctggcattcgcgatccggagtccaaccatgctgatatcgtgtttcagaacgtgaccttttcctaccccacacgagcagaaatcaccgtgctcaagggattccatgctcgatttgagcgaaataagaccacggctctggtcggaccctccggttcggggaaaagcaccatcgtcgctttgatcgagcgatggtatcaacttcagtttgaggaagaagaggccacgtcgggccatatccatgtgggagctcacaacattaatgacctggatgtgaagtggtggagatcccaaattggacttgttcagcaagagccatttctgttcaatgactcaatatacaacaacgttgcttttggtctgatcggatcgcagtgggagaacgatacagaacccgtgaagatggaactcgtcaccgcagcttgcaagcaagcctttgcagacgaatttatcgaccgccttcccatggtatcgttacacctcttgcactgcatttctttatgacggaaaatctgattattttatttctagggttactcaaccactgttggggaaggtggaattacattgagtggcgggcagcgccaaagaattgccatcgcgcgaagcatcgtcaaccaaccccaaattctcatacttgatgaagcgaccagctcgatcgatattcaaggagaaaagattgtgcaagccgcccttgatcgtgtgtccaaagatcgcactacaatcatgatcgctcatcggttggccaccgtccgccgtgcggacaagatcatcgtcatgaaagatggccagaattttgaagaaggttctcacaaagagttgatactcaaggaagggatataccatagcttggtccatgcgcaacagctagagccattgacagatttgatggataccgacatgccagtttcgatttcttcgcagaaagaagaagtcagagctcaggcttacaccaccaaagaaagcagcgatcaaaattgccaggatactcccgagcctgaaagagcctttggctttttccacagctttggggtgctcatttatgaaaatcgtagccattggatcttctatgcactgacactgatcggggctataggggcaggttgtaagtatttgccttgctcttttgcatatttccaaatatatgcttacagattccaatagcgggattctccctacaaagttggctttttgctagacttgtgcaggttttccagttcactggcgagaagctcgtgcacgctgcgaacttctgggcattgatgtttttcgtcctcgctcttgccatggcgaccttctatttcatgctgggattttcatcgaattcgatctcgatggtgagtcttacaaatacacggacttcaaacaaagctaactgttcagtttgtcgtgtccaatgctcggatggattatttctacaacctattgtccaaacccgtgtcgtactatgaccgcgaggaaaattcctcgggtactctgatatccagactctccactgattcaaaacagttgcaggaaatgtttggtcccactggtgttttccctctcatctcgatctttaacatcgttggatgtgttgcaatctccttcgcctttggatggaagctggcggctgtcaccttttttgccgccatgccatttttatttttctctgccttcatgcgcattcgatatgaaatcaaattcgagagcctaaatgccgaagtttatgccgatagctccaagtttgcaacggaggcggtccgggccttcagaacggtcactgctttgaccatggaagatacaattttgaaaagatattcaaccctgctgaaagatcagcgtcaaaaagccactcggaaggcgtggtacgcaacgttggtatttgcgttttccgacagtgttgagctatgtgccatggctctcgcattttggtacggcggccagctcctcgcgtctcacgaatatgacccagttgcatttttcgtggtctatatcgctattattcaaggcggccaatcggcaggacagtttttcagctttggtccaaacattgctcaggcgaaagcttctgccaatcgcatattggctgcacggctacctacttctgaacagcttcagcatgttccagtggggccgctctcttcttcggactacacccccagaccctctgttgaactaaaaaacgtctctttccaatattcttctcgtgagataccaacctttgttaatttggacctcgccattgagagcggtcaatttgtagcatttgtcggaccttccggctgtggaaagtccacgcttgtctcgctactcgagcgcttctatgactgcactcagggatgcatcttattcggtggccgggacattcgttctattgaactatcctcttacagaaatgctttatcactcgtcgcccaggagcccaaactcttcgaaggaaccatccgcgagaatctccttctcggtctcgaagcccccaataacccgaacaccgaggaccaaatgattcaagcatgcaaggacgccgaaatttacgacttcatcgtatccctgccagatggcttcttgacagaacttggcgtcaacgctcaagcctcgctgagtggtgggcaaaaacagcgtatttgcattgcgcgagcgctgatccgaaaaccgctacttctccttcttgatgaggctacatctagtttggactctcagtctgaaagtcttgtacaaggtgctatggagagattagcaagcaagcgaaacatgactattattgcggtcgcgcacagactagccactattcagaaagccgatgcaatttttgtctttgcagaaggggcgttgggacagggatcgagggttattgagtcgggaacccataatgaattgttgcacagaaagggggcttattggcagatggtatgtttcccgagccacatctacttcttttgactaacgtgattatagtgccaagcgcaagctctagaccgatgaaaggatgaaattttcaagcagtactcattatttctcttctcgtatcccatacttaatatatctccaagactagcgcaaaacacggcattattcttcaagaacctactgagcgagtatctaatctccttcatcaagttccgagtgtacgaaactcggctgcaatgctgtggccctatgtaatatataaatatatatcattccctcctcctcattcacctcctccaaccacttagttagaatatatgattctctctcatgatgattctagtacatacgaccatagggtgtggaaaacagggcttcccgtccgctcagccgtacttaagccacacgccggtgagttagtagttgggtgggtgaccaccagcgaatcctcactgttgtatgtttttgtcttttgttgcttcaaataggaatggaatggcctatatggctgcagtataaacctcaaagctcaagtgtgtatcgtattagcatatactccgtagaacttcgtgcaacaaatatgtaggagggaaggtgatatatatacactgtaaaatataattttagcaaacacatatcaaattgccgaagatatacatctcagccgttgaatctgacttctcaaggagatatctacttcatgtgctgtggtttgcaagtagccaatcagacgagatttgatatttagatcgatatcacgtgaccatatttgtacctggcttatcgataagagtgccaagccatcagcaacccaaaacttttccgctcattcgatatttttaccgcaagccattctgccaatcattcactacaaaatgttgagagaagtgtaagttatggcaatttatctagattgtgatcctagtctaattctctgccctacaggaaagccaagaacccgcgcactgcgcgcatcctgaaatcgcgggagccgcaactcatcgaacctcccaagaagaccctgattttccacggagcgaaatgcccccaaacgctggacaccgtgctgaagaccttccacgctttgacgaagccctacaacgttcttttccacaagaagaacgagaacttgcatccatatgagaactcggaaagcctggaattcttggcgaacaagaacgagtgtggactcgtagcattcggaagtcacaacaaaaagcgacccaactgtgttacattggctcggatctacaactcagagctgctcgatctcgtcgagctattgctgctccccccgagagatggcgaggtcatcccgcccatcaacgaacttgttatggacgtgggtcttggcctgcgacctatgatgctgttctctggtagcccctgggacgatcctacatcgactgcgcacaaaattctcaagagcactcttcttgacatgttcaggggcgaagagacgacccaagtcgatgtcgagggcctgcagtacgtgatgatggttggtgcggaggagccccaagatggcctctcgccggttatccacattcgttggtacagagtcatcactaagcgcagtggtcacaagctgccccgcgttgagttgcaggaggtcggtcccaagttcgacttcaaggtcggtcgcacacgccaggccgctcctgaggtgcagaaggagtctatgaagcagggcaagcgtcccaatgatgaagcccgaactaagaagaacatcatcatggactctatgggtgacaagattggtcgtgttcacctcggcaagcaggatctgtctgacctgcagactcgtaagatgaagggtctcaagcgtcgggctggtatggagtcgtccgacgaggaggaagagccgtccgcggacatgatggaggtggatgtggtttcttctgatgaggaggaggaggagactcacaagaaggcacggaaaaactaagatcgatttgcatgatttctttaaggagtttgggccggacgggatttcgttttctgcgcctgtatgagcagtcttacggcatatgaaaagttattttaaaacctctacatctaatagagatatttcctccaaccattagtttacactagacttaaaattcgctcgtgtgtccgtaatgaagattttatatacatccacgtgaccatgacgtcggctgtattctcacatgccgaggcccttctcaatgcgggaaccgattaaagtgccgtcccctctctcaacatttcccgccgcaggaaaacctctatatctttgctctatttcttcctaatgacccgtgacagtctcctggtctttactcgttgtccatcgccccgataatcaccccgaaacgagtccgaccttttaccgaggcccagagacgccatggatgtattgctcgtgagttccggagcgtatccgactatacacagcagtattgacattctcctccgcagtcccaactgaacgcgctcgttctaaagcccgaactcgcaccgctactgtcattagtgaagggtgcacgcaatggaatcgtctacggatcgaaagttcgctttccgcatgcgctggtgtatgttagaccttggacagccgaaaaccccggtatatggcatagctgactgactgcgactgcttctagaatgatatttctgttcagatctggaacgtacgtccccacgcgcgacctcaccccccagaacgaaactgatagctttgttattcaggatacgtgaaaagacgaagcttgttttgaaagcaacccgcctgcatgcgcgtaacctggccacatttgccctcatatacaaggcatccatgatcgtgctccggaatataccagctggcgccgggaaagaaggccgatatgatagcttcttcgcaggcctgctgggcgggtatgcggtttttggacgacagccgggcagtattagcaagcaggtatgtaatttggacatgcgcctgattgtgggaactattcaaacctcgactcccgaatacactccttctctgcagagctaactcgaatctagattgttatttatgtcttcgcgcgtgtgatgcttgctctcgctaaactctccgtccaaccaaaaatgcaccctctttcctccctcatcacgtccgatgctcgcagtcagatcatgaataatgcttaccccgttttcgccggtatgacctgggcgatggtcatgtacattttccggtggcacccggagacgctggcgtcgagcctgcggagtagcatggtgtatatgtatgtttaccctccactatatatgattagcctcagtttgagtactttgaaagttcgagttattttccaatgctaacattcatgtcaacaacagttacggcgactcagaccattgggattccctccgcactctgcttctacacaacaaatgagctctcagcggggccggctcttttagctttttggtgtgttatggcgtatagaccggatatcattttgttggtgttttttgcaagttgcattcgagataggcatccttcaggccctactcatcatcccctttttatcctgtattatgaggcatggaacttttttttttcacacatttttgacttgaaatataagctttttcagctttactttgtggggattttcgtaattggatagactcaattgactcaaataaatttgcttgaatgcaagattgagcatataaatttgaagcttgacactccttggaacacacatctcacttttgctgggctgtttaatattgtgttgtgatgtgacatagtaggttgaatatattttgaattttcgaaataatcatgggggaagctgggaatatattcctacgaggcagttcctcattaaggaaggtagtgcatactggaagcttggtatttctatggtcatcgtggtggcagttgaaattcaattcaggggaggagcagaaatgtgggaggtaaatggcatcgtgcaatagaagcaagaatagcttcatcatatcccaaaagagacataggagaggaaggtatcagaagaataaacaagatcaacataacaaaccaaaaagtgtgagcatagatggtacatgtgaccgcatacccaaccaccactcctccatcaacaaatgaagatagaccaaaaagagcctcaaaagaaacctcaaaaagacaaaaaaaaggccccaaaggagcacctctacaacctgggtcactcagctgccgacggggtatggatggcggtcacattccggccaatgacttacatgcaaccctgaccatgggaagaagccatgaagtctcagtctcacaattaagttgatcaagttcaaaggtgagggttgaaccacaggcatctgatcatctctgcactgtaactgccccgccaaaacggaacaattacgggcacagtggcttatgcggttcccgcaaggctacctgggcgaggctttggaatatctgccttgatgttaatgtaaagggaacatattgttccaaattaggactagtacgggactagcacggcccggccccactttaaatgtctgctccacctcttcttccatgcaacccgggaacgttaaaggttatgtgcaccgaggatacattaatcgtacatgttcattgggcttttcgaaaattgggggtataatgatacatctcatccaacaggaaaacaacagggatatcagaacagaaaaagaaaagaaaaagaaacgtcacaaaaccgaactactgcccatccccttcaccaacctcaacaagaaccttgagctccccatccatccagtcaacagcatcagtagtgagcaccgcaatggcccagtccttctgattctgcacatgtagcaggccatccggcaaccaaaccttgaccttccacccatccacaatggtagactcgcgagcttcttgcgtagcagcattcacggcctggaattccgtcaaaccggggatttggctcgaataccgacggagaattgcctgcttgaccatgtcgatgttggagcactggcctgcgggcagttcaaatctggggaggatgcgctttccgttttgcaagatattgacgcgaatagaagtttggctgtggccgtgagaggagtccgttgtgttggccggagttgactcgggcagagaggtgaatggttgatggaagtgtgggtcgggtgcttcggttgggaggccgtgtcgggcggcgatgttctcgcggatgatgcgagacacgtcacgggtgatactactcgcgctatgggtttgttagtgggaattgcaaatgtgtttggaaaggttggatcgattacaattcaactcgggctgggaggttgcggcctccgccaatgcgccattggagatctgaggtggtgtccgcgtggacaatgcggttgatgttcgcatcttcgcaaatcgatgggcagtcgtagttcccgttgtggacgacgtggtaatggctgtcaactgcggcgacgagcccgcgccaatcgggttgctggagaccggagagagaccacaggttatcaagctcaaagttctcgttgtacgtattatagcagcgggcgatctcttcccagtcacctgtgtatccgtctaggaggaggtcggtcagactgaggtccataggctgggacgaatccattgcggattgctgcatcggcggtgggggagccattgactgcgacagatcatcgcgatgggatggctgattctgcatttgtagatgctgctgctcgggagaaaattccggactattcgccgacaactcttccgttttacggcgacggcgtgcttcagcaccacctcccttgcgcgtctcaatcgcgtatcggcgttgcctttcgttggtgaccatccgtctgagcaaaggagtgatcaatgagatgatcttgttttggtcacgcggccaagtgtgaattctcgtccccacgccatcattaacggcatcctcgccaaaaaaacgttcaccatatccctcagcatcaaggaactggcgaacacagttccaaaggcgtagcttgaccatttctgaatctccccttcctcgctgaccaacacaatcctgtctttcagggtgttcatcgtccagcatgtaatgtttagcagcagactggagatgtataaagttctccggtgagatcccaagggaggcgtacaactttgagatgggaggccgtgtgtacttcttattgctagagggctggcggaacagcgccgccgcagaatgaatacccaccgcacgagcatccgatagagactgctgctgctcaggccgaatgtctatctcttctccggtatagtcattgggcgcttgctgtgcggaatgcgactgatgctcttctccggtatagtcattgggcgcttgctgcgcgggatgcgactgatgctgcgtgtcagagagaccctcgccagccaaggcggggtcgaggttatcatcatcctgatttcgcttgcgctttttggtcgcggttcgtgtgagccccgaggattggggatgttcggtgtgactaggtgctcgcatgtgtcttccgctgctcatgccagccccgaagttcgcgtcgccgaacccgttcccagagagatccatgtctgtgtatgaatccagctggtgatggtggccagctgcgccggctgcggcggcgactgcggcggcggcagcccattgcgaaacatcttggtctgcggcagctgttgctgcctcgactagtcccgcgagctggttgtcattgggcgcatatccgttgttggtcaattgcgcgttcgggtcgaggtggggggcggttgttgtgtgttggggtggaaggtcggaggaggtagtggggagatgttggttggtagaggagctcatagtgtcgattgagacactcggttcgataagctgataatgtcggaaagcggatattgaggcaaaaagtgcaaggattgaggtaaaaagagcgacaagatacttttgcttgagagggaattcgagggaaaaatcaaagtgagttcgaggtccccgaattacctctagaagggtacgtcttccgagtcgaagctcttatccagctgtagagcgtaataaaaagcttcacccattagaggtactgcttcctagagcacagttgtcccagcgcgccgcacccaagagggcgagaagcgcgtcacagtaaaaaaaaaggtcaaaacaaaagtatggagaagtgatgcgacagcttcgtttggtttggctgataagagacgcgcgacggttgatgtttgtgcagtttgaagaaacaacagacagtgcaaactggaaaaacggcgagggtcacgtgattatgggttccattccaagtgaccctaacaacattttatacagaatccatgacatacctgacttgaatttgagcaccgaatctcatggacacgaatttgaagtgtttaataatcatttctatgcatttgaattttagatatcaccctttgtaagaagcacaaggcaaaaacagaaactctccataagtacacccaaaacaagaaatcagtccaagacaatcaaaaaccgtccgactatagcagaccacatgatcctgtggattagaagtaatgatgttgacagatgataaaacatgttccaagggcaggcctccgtcatgacgagatggtaaatagatggcatatagatcattggcccacataaacttttgcaatcgtagaataaaaagaagaagattcaaagaaagcagcacttgatccagccaagacagctcagaacccatccccctctttccaaggacgaccagcctcctgggcacggtactgggggttctggccacgctccatagcagcagttagaaggccaataatctcctgttgcttctcctgaagttggctgacgaggacattgcccttctcgccgtcagagtcatccgattcatcagcaaatccaatgtcggacaaccacatccaattatccaattcctgctggatctcattcctcttcgcttcggcttctcggtaattattccactcctcgtttccgccaaaacaaaacccatacccgtcacacagacacacattctcctcaacgcagagaacaggctgtccggtgaagataaactgccacagatactcccagattcgaccagcgatataatcactcagatccgtcgacagcagccaatcgcgatagaacacaaaccgggcccgcggaatggagcggatgcgatcgcgggacacggcgaattgcgcacagcacggctgcgccagcacagacggaatctcctggtcggggaatagctccccccacgcacgggccagcatgatctcctcctgcttcgactcgtcttcctcgagagcaccggggtgcatccaggccggacagcccgggccgaacccgcagcgagtattcatgtagccctcgcggatgacacggttcagattgaggcggcggagcagctgcgccgcgtctccggcaaagaggttatcgttgtgccaggcgaattggtgcgagtgcatgaacaccgccacgtctgggagctggtcgtagtggtcgacgatgtaggtgaggtagatcatgacctcgtggcctttgttcttgggcgggtggagtggtgctttggggtcatctgcgacatagatggcgtggtcccaatctggcagttcttcggcaatccagctggtgtcttcccccttggttcgggtcacaaccatcaccttggagtaattgtagcccgagggctttgggatgcccgagatgaagtccgggagaggggcatagaggttcttgcttgtgtggccgcgggtcgtgttccaggctcctgttgtattggatgatgagaccaggtcgcccaggccgatgacctggggtacgtcacgccatggtcgtgagaggcttcgggttgtgaggaagaaggcgaggaaaaagcagacgccgagaaagaagaccgctcgccgtgggagaagcatggacggagggttgacgaagcgtgcacgggattattatctgttgcacgagatgatggttagctgcaatgtcactgtatgccactgtgtcgcgtgcacagggtgagaggatggagatcgcgaggtacggaatgcagaaagcttggaatggagcagatgggaaacaatgccttacatagcttagtgtaacattgccccgagattgtaaggaggtggaggaaaagtgacccgatctagattcaagggactggggtcaccctggccggggaggctgctgggctctgggcaaatcagacgcaagtggagtcgaggtcgtgccgtcatgacgaagcttctttcaatgcgatttatagcatagggaacttcatatagaatagtgagttacagttataagagaagaccattgactaattaatacggtaaatatcagtcataatgaagcaatgtaaatgtcataaaatattattcgtcatattaattcatctaacacgggaagcagcatgacgatctctccaagaattcagctacgcggcttgaatcggctacgccgtggacaccaaaggtagatctacctctctacgctatactctcctaatccaatcttcacttgcatatgcacatcttcatttgaccaaagtaatcattgagagcaaataccatgagattaaaccgtggtataaaaatcgtgaaaagaaatctgggtatgatcttttgctcgcgaacaacgccatgcagaaacgctggtgtaaagaaccggggaatggagagggccgggcagaacccgaagagagaaaaatacacaaggaggagattatcaaaaggagtccgggatcaagcttcttcatcaggagtttcctcaactgatgcggtccggcgcttgccgtgggatgtggactcgggttgagtctcggcttgagcagaagcactacttgcagattcctcattggtaccccatgtagtaggaatagaagctggcctggcgtcaaaggaccctctaggagcaacgtcggtccattcctgagacggggattctgcacgatgttccactgaggggacagtgggtgttggttgcagtaccggtggactaggggccccatttacgggatgggtttcagcattgacggtgccgtgcgcatttatcccgacgctcccgctcgtttgatcctgagcaggaacggggaatggagagacctgagaagttacagcgctagccacggctggagcagccggggatgtcactgtagtggtaggagtaggttgtactgtttgttccacaccgccggcactattatccatacgctggagaggaaggagggtccaaccagggggaagagtgagcccttccggtagacgagggtctccagggtttagaacatcagtgcccgggtttgcgccatactggtggctcgttgtgaataaagaagatgccggggctatgtttggaggcggagccggttggccggcaccaggttgaccggcagctggtcggttaacagcccttgcttgagcaagcaaccgctctagttccccccgaagctggcgcacgtgatttagatgctctgtagcagctcgaagggtggcaatctcttggttcagccggtgctcgatgtgcagcaactgatcattgatttcagcagcgatagatcccccagccgcagcttgtggggcgggggtgggggcttggggacggcgcccgaatccaaatccaaacccgatttgtcctccaggggcattcgcaggggggtttgcccgcggcgcattaccttggtgaagattgttgaataaatctccacgcacagctccaaagccgatgcggaagggtccaaactgatagacccgagcacgtggttgtgcatccgcaccttgttggcctggccgaataccaccattctgacctccgcgtgcgttgttgtctgcaaccccggcagctccctgagttcgctgtggcattataacaggacgtcggcatgtcgggcaattttgttgcctctcaagccagcttcggagacacgaaaagtgcaggatatggccacatgggagcttctttgggcgtagacggtcaggaacacgctgtggtgcaggctctccagccgcatcagcccccggttgcgccggccgaaccggaatcatctcttcacggcagatgatacagacatcttcccgggagatttcctccgctgttgcatccggatacctctgatgcatatcccttgtcgcgtttctgtaacgcatgaagtccataattcgacgcgcaaatgagcggatggtcacaacaacgtcccgcagaatgtggatggggaggccgtagaaagtgagcagaatgccaaagaagctcaaataaatcaggagtttcaacaaatcggtcaaaagatccaagtagaagacccaacgacccttctcctcccacccgggcacgtcgatctccaactcattgacatcgttttcgtcgggcagattgtcaggaggggaggtagctcccgcgcgggcatgttctcgaattgcttcgactcgcgcaacacggatctcatccctacgttcctggatcttggcctttatttgctggcgggttatggatatttcggttaacgcgataacgtatcgcaggagggtggaggtcgagaggattagcaagatggcgaattcgaatccaaacatcaccatcatatccggccgtgcctgcgtgattacagtgtgcacacagtaccgtaacataaagaagttgaacgacaccgtcagcacgagagatagcgccagtcgagtatggaacaaccggggattagccggcggctgttgctctaggaactcaacgcggccttcgccaatccatccccagaccttaccgaccagcagcgaaatgaacatgaccagaaaccagcctccaagttcgcctcggaagatggtcatagccagacatgtctctgtgacggcgaaccaggcccgctcgtatagttgttcggtctcgattggtcgcaagcgtccgtagagaagtcgctggagccagaataagataaagccggtgacgagaaggcataaattcgtgaggatctggagatgtggtaatgggttagggactatggccaagcgcgataacccaaactggacaactcaccataagattcgcactactctgagagagatagacgcatgccgaatagaaattggacctctgatggagagcttttagaaacacaccagcggctaggaccactgaggcctgtgaacgggttccaatgttagcgggttatcttccccatcagctgcagtacttaccccagcataagcggccagtctcatggctatcgactggatcggacaagccgaaggtcgtggaccaaaggaaggataaaaaaggtgggcgtctcaaggtagcatttggcggagaaacgaagtgaatgccgtttacttgggaggagtagtagcttgatctggacagctttccagaataacccgtgggcgcctctccgcatcttacgtcagctaccagcacgtgctgccacccagatctatacatacctttacttaacacatgaatagattcgatttcgctatggtggagtatatatttggtaatcatgtatagtctaatatgttttgttgaattcaaactattagactcactttaaacgtcaggacatgtccgtcgatcttcgatgattatctgatcatatccgtcatgtgacgtcccacattgcccgcccttggaagaagcaaccattgtgacaccgttgtcctcgtcatttgcatcgaacagagagatatcgtcatctctgaatcctataataaatgaattatcgggggtgatggcctcatcaccggcattgttcactgcctcgcgcagccaaacactaacttacctcttggcagtgtgccccttctccatcgccttcctagtttacatcaattcatccatctccttcgtcgtaacagatctgatagggctgcagaatggagtcggagatgctgtcggaactctaggattcgcagacgaacttcttgcgctggttgcctgcccactttggggtgtcctctcggatcgaatcggagtccgccatgtaagcttgctactgacccttgtcaggataattcaatgatattgacgctagataggtatgtacggcaggctatgctattgtagcacttgcgctagtcgtttttgtgcaagctacgaatgtctaccctcagcttctcttgggaaggttgctctttagtatcggtggctcagcggtatcgaccatggtcactgcagttttaccaacagtcactggctcagcctttaatgcccagaaatatcgcgcatctatgtcttcagaattgactatcacaccggagcgtgccaggaatggtcattccgtagatgttgatgctttcagagcatcgccgtctgcgcgactctccgggtttgttggtatgtgtgctggctgtggtgcgctcgtggcactggttgttttcctgccgcttgcagcccgatttgagaagatgggattgtcgccatcgcaggcgatccaacgcagctattatctggttgctgccatatccctgattatctgtctagtatgcttcattggccttcgcgatcttccaggagaacaaggcaaaagttggagtgcactgtggaaaacctctcacgaatcggacgatgacgaagatgatgacgatgacatatatatccatcgcccaagattgtcatactggaagcagttgacaactgccctcacattgggattccgaaaccgtagcattggactgggctacgtcggaggcttcgtggctcgagcctcttctgtggggatatcattgttcattcccctggccgtcaatcactattaccgcgcatcgggcctctgcgacgaggaacgtgaaccggttcctgggtcgggattaggggatatcaagaaagcttgcccacgtgcatacatcgtcgcatccatactgaccggggtgtcccaattggtggcattgattgcagccccagcatttgggtacctgacagacaaatcacgacgatacaatttcccccttcttttcgcagcattagtgggaataatcggctatataatctttgccatgctcccaaaccctctgttcgaaagacccgacggcaatccgggtgtgttcgttgtgatggctctgcttggaatcagccagatcggagcaattgtctgcagcttggctgtgttgagtaacggtatcttgcgggtcagcatcgacaatgaaacattgagaaaaatatacgaggagcgccgtgtccgcggggacgagaatgacactgagccagatgaaggccaggctcttcttcccgggtcggccaaccgcagattggagcatctgtcccacctcaaaggctccatcgcaggagtctattcgctatatggtggagcaggcatcttgcttttaaccaaagtgggtggactgttatttgacatcctgtcagcggggacaccattctatattatggcgggcttcaatggcgtgctgcttgtcataggaatcgtgtgtggggctatcaatcacttcggctcctggcccggaaggacatgatcaatttcgctttcatttgtttttaattttataaaattgtcatggtcgtgcaggatcttgttgaactggctgtgaatataatttcattctcagcagggagaaaacggccccaggttgaattatcggcattgctcggctggcaatagagtacacgtggtttgcagtgtcagcggagaaaaacaaattaaactattgaatgaaaaaacggttcagaagattaattaactcggcatccatggcgttgcgcgttcatgaaattgggcacgggctttttcatcgggcgtaagtacacgctaactagtcagtgacggggaaattacaaaagataatggcgacaagtatataagcattttgaacagtaaacatgtactttgtatactatttacttcaaaggagttgagttttcttatatacaatatcttcctccatacacctgaagtttcccaactcatggtgatctcatcccgctagtctcgcgttaatatgaagagcatcaaacaaccttcccaaagaggcagcctgaaccaggggtcaatccggctactagtcccaaaccagcctagtcccacagtaaactttgcactaaaaacgcctctaattttaaaccgcaaaccttcggaggcacttggacgtctaaggttggatcttctcaaggttgcaaggtcgaatgcggaaatgcccccctttttctaaacatcaccggcctcgggaacccctggggctcgtgttggcgtccgcttggactgcaatgtcggccaatcccgctatgccaaactcgtcgcgacgacactatgttgcatggccaaagtcaattatgcgcctaacccccaatgtctctctctctaacacttcttcctctttcacaccttcagactcaagcagtccgtcattcactctttcgtcgtccgacagtctttcgttaaaatccagtccttcgttttgagcaattgttgatctacttcaagtacatcgtactcgcattctttgtgcacatcttgattatcaccaatttttcagtataaacaccggttcaccaccaatctatttccaacatgcgtttctacaccgtcgctttgttggctggcgctaccgccgctgccgccggtaacaccgcaaccctcctgctgcccggcttcaagggccaggatctcgaggctagcattattgaatccgtgggtaccgattcagttgcgcgatcaacgcgctctttgtccgagcaccttgactgaccatccacagaatggagatgcgactacctacaagatcacctgccctaagaccgttgcggcctgtggtattgccggcgagggcatgaccgcaattgctgccccgacctccatgcagctgcagaacatcgacctccagggaacgtaagtaccggcacggactttcctcgtaagaaacggattctgatatcaaaaaccagccttggaactgtttcctgcaacattgctggcaccacttatgcctcctgccaggcttccgccggcaccgtgaccccgtcgggaactctggcccaagaagatctgaactggatgccagtcactatctccgccaccccgaccccgacgtcgacctccaccccgacccatacccccactagcaccagcactagcactagcacccctacccccaccagcaccagctcggaaattagcaccagcacgaccgaggtgagctccaccttcaccccgacgatcacatcctcgccgaccctggtcatctcgaccaccaagaaaccttcttcggcactcatttcgtctgcccctgtggcctcctccacccctcttgtggtcgcgtccaccagcgctgctgccagcggaagtgctcctgccgcttccgccactgcctacaacgccgccggccagttggtaggcagcatttggactgttggtggtgccttcttggctctggcctgcgctttcgcgtaagctcaacgcggaatatctatacgtttccgtcttgtgcggcttttggttgtgaaagacaagcttcgcgcttgtcgatttattaattccggggtttccgacgttgcttcttacggatgtagtcctgtatactccacctatatgtgtccatctcttattctttaatgttttatacctttctccacgacagactacgatctagcgtctcttttttacacttgtatcttcagctattgaatatacctttcctttggttttcgagacttttctttgttgcctctttcacgccccggacttgtagcccctgtggatataatccactcctgaaagatatccacatacgcctcattgtgtctcatttttgggtatgcattaggggactccaccgaccacggtccctggtaagtacgccaccaggcaataaacaatcacttcattctacgtaggactccagcaaaacggcagacacacaatagtgagttttcacccagtcatattgatataagagaaaaaggtcaaaattaagaacaataaaaatacgaaaaacacaaatcaaactcaaagttcttgccaacgccatgcggcactcgcaatactctcgagggagggaataggaatcactgggtcggtctccggcacctgttgcaaggtaatgatgagtggagagatatcaggtaccgcggtaatcggtccacccggtggccggaagaccacaattgactgacggacctgtgtcacatatcgacgctgacccatgatatatgtaggcggctgctcaagcacaacggtctcaaacgtgacctcaggcacagtccgactgaccgctatagtgattaccacatgcacttgcccctcagagttcgccagccaccagtccgcatccgctcgcagtttctttttagcctcagagactccgacttccagaataactgtgggccacttttcgcttcgacccggaggaagttctcggggaatccatgatccatctggttctttggcgcaaatgcctccttctacccgtgcagttgtgagcgaccattccgttcttcgcatattcgcaagagagacagccattactagatggagctcacccacgagggcatcgtggggtcggcccggtatggtaacgatcaggctccgggtgtgtcggtcgtaaagctggcggtattcattggagagaatcagctctgctatgtctggtggcacattggtgaactttgcatattccgtgaccagatccggggcactctggagacgggccagaattgacaggatggcgtaggctgaggatccgatcgtttccaccgcacattccacatcgaaacaggcaaggtcaagatcagttaggtccataatcctttcggcaacaggcgaagagaaactgatgtgtggttccgaggaaaagaccagttctgtctcatcgaagcttcttggtgatcagtcaccgagtcattcttacctcaccgacttcttgtttctgagctgcatctttactcggtaggtttgaatagctcttccataaatggtggaaatgccctctcctgcgattcaaatggtctagtgaagccttcaagggtagaaagttaaccgtgaagctccgcgagctctttgatcactcggataatttctcgtgggcaaggcttccttggtgaataatattttcaatttctatcataagagaaatgtcagagaccagaggtttcattattcatagaaaatatatgctcaccttctggtggatattcgactggcggaccccgaactttgcggtatttagaatctggcacgattgcgatctttccgaaattaggtcacgtccaaaagcccgatgagacagaactgaccatgttgtcttcaaggtctgtatataattgatctgctgccttcttgatctcccgcagatggttttttaaacgggacgtttgcgacgagactagtaagggcaggcggtatttcccgaggatcttcttccagcagtaccatttaacagacgttgatgagattgtatagttgttatctgccagccagcatatcaactccatatgggcctgggctagaaacagggcacggttggagcatcgaaaattttgccttgcagcgtcgatgagttcgccgtcaagcgcggcgcgatcagcgtaatcccaaaggtattttcggaaggcccttctgtccagtctattggcttcaaggttgtttgcgatcgtactgacaggggttgcaatactgtccagtaatccaactgcggtggtgattgcttcttgatacatggtgaatgttagattcaaaactattgaaagatatttcacattcaggtgcagtggcgtctttttataacacaacatgtacttcgaatgagacaaatatctaggacatgtattgtgatcctcacctcagcgcgcggcggcgaagtgtaccaaaacctgtttttctcaaactattccatggattgatcattattagacaggaagaacttgagctagaaacccttccacaacactagtcagaaaatatgaacgactagagaggttgcaaagttggatgagatatcccgcttccaacaaatcatcattattcccttgccactctcttctttgtcacatctagacccataagacggatctgtagcagaagatccagtgagaagaacctcatttagtaggtcatgttacggcatctcgtatttcatgttcatttaagtggacgccacaagtaataaagttttagccgcaagctcagctcggcatttcctgcatagacagacaggtacagatatcagttagaagtcccgatcagaaatattggattgcgaaatttgggttcgaccagacagaatgctgatgtcggtattgttgtggtaggatataatatccggtttgtagctgatacagagttgtaggggatgagggtcatggcactgctagatatgttccggggttcaactttgtttgtatagaccgcgacgtcataaacacttatactcgccacatcatgcgttgacacccaaacaagagaatgtgctgccgtaaataattaaatattctaaataatggactgacaatagagagaggcgaaaacaagaacccagcagggagcgaaggcgaccaaacaaggaaagctcccaaagccagccaaatcagacgccggacataccccaacgaggcgcgttcacgataattccggtcaaacaaccggcgatgataccggcgcagggaagcgtgatgatccaacccatgtagatccaggcaaccatccgccagttgatcgttcgccaagtgccgttgcaaagcccaacaccgacggtagcgcccgtaatacactgggtggtagagacggggagctctgcaagtgtcatgttagcgtggtgatgatttgggaatagataaaagggacatactcagcctggtggcaataatgacagcaatggcagcaccgagctccatagcgaacccacgagagggagagtgcagggtaagacggttacccaagttgcgcatgatgtgataaccgtatgtccagataccaatggagatagcggcaccaccaaatacactggagaatgtgagttaacacgggcgtccttacattgatggaataaaacttacaggatccagatggggacttcggtcttagcgccttcaagggcaccagttctccatatagcatagatggttgcatagggaccgacagcactgggaacagttagtatatgagttgatagtaggtatgaaatgggaaaaccaactttgcgacatcgttcgcaccgtgggtgaaagaagcggtacaggctgtcagaatctggaggaaagagaacatgtactccgcttcgttatcatagtgatcagcatgggcatgggtcttctcgagatcgccagcgagtttgctatcgctcttctgggcgctaacaatgtcttgctcgacaccgtttaggagggccttcttcagcagccagaacaggacaggaccactataccatgctccttcgggacgaggaccacaaatgttaatgacatcgggatccacggcttgcgtcccgttatccgagttggcagtgacctggggctctgccttgagatcgggggaaccaggctcgctgttgctgttgtggctcttttccacatcagtggaacgctcagcttccagttcctctagggtcttgtggccgcgatagtagttacggacggtctcaacacggtcgggaggtgcaggaacttcaccacggcggaagagaagagggccgtagattaggtcccaaggcttgagctgccagtcacccataatcaccctgcggtagatccaggggcaaaggaagagggccgagataagagccatgccaacaccaacaccaataacagttccggctatctcacgcccctcgaggttaatcctgctactgccacccttccagacaatgagcactgtgttttatcagtagccgatacacagagatcagaaatttgacgaaacatactagtaaggaggccagtcgtcagaaggaagtagaatggaatggtgtataacgccctgagtgcgggattcttccgcagtaggataccatacttggtgatcaaaaagataagcgcaccggcaacaccagataagatgggtgcaatcacccaggcaaggaacacctggacaacaccggagttgatatcacctccccaccagataatatcatcagcaccgataagcgcgatacccatcccaaggataccaccgagaatggagtgggttgtcgaaacaggaagaccgatcttagtacagaaggtaagatatagagaggaggcaactacagcgcagcacattccaagcatgaggaggggggcgttgtcggcgaaggcatcgatcttgacgatcttggtacggatagtatcagaaacactgtttcctacaccgacactggaaatataggtgagtacaaagtcaggaagtgggaagcaggtcatgaacttacgctccggcaaactccatgatagatgcgaggatcatggcttgccagtgctttagcgaacgcgacgaaacagacgtcgaccaggagttggcgcaatcattggcgccgatgttccatgcatcgaggaacgcgaatatcgtgccaatggcgaagatgtaatcatactgctgaagaaccatcttgacggttggcagaaagcaacagcttgtcctttctgaagggttctagaaggactctgggggctgacgagataaaaaggaaattagcaggatgatccggattggatctttatatgtgcaagttccaatccaggccaggagatggcagcccttgcgctgtagatgcagtggtgcaaccatccaggatgccaagctgcccaggcccgccgcgccgccaagaaactcctccagtgtccgtgcacttgccaagacgggcctccgccgacgaatcctgccatgacatacgagaacgtgtccaccgatgtggaaagcttcagactacctgccatgacctcgctaaacgtcgggctaattcctctggatggttcagaaacacgaggtgctctttgcgaatgtccttcttccgactggcaccataatctgccttggcccttggcaggacagagcccacgccatgtaggcaccttacataagcctcgcatcgtgatattaaccacatcgtgcttaaatccaacgttcttattggccggctgattaaattattgacattgagctctgaatctaatcctgacatctggcgcacacctggacatcgacctcggttgtcgcgtggccaccgtgacccagctctctcagttcctcgacctgtcgctggaggtattggatgtactccaccgccgtctcaagcagttctgcctggccaagcaagttcgagtgagcacattggtctgtcatgtcaggagattggctgtgtcagttgcctccataccttggtacctttcgttcccgcgcctcccatcctcattatccgctctatttgacccagagctactttcatccgatcccgttgagacttttgtgcgtcagcgtgctgtctccttcgagtctccgttgcatttggacctgtcatgatgaggagcgagcctgctccaatgaatttctgttagcccatccatctcccctggggatagtgttgacgtcacacgcgaattcaaaatgccaattacctttcggccggatctcgaccaactgtccctttcggtttaggagataaggcaatctcatttgttccgcgtctgctccagtgggctgcgcagttgcatgcacgtgcgccattgttaatatataggttcagcaccgaatttgccttcttgatagcttgatggcttttcaacagcttcaggctatcgggctacccgagtggctatatatattggccacgcaaatgactcgggctcggactttagcctatgcatgaatccatgccgtgcgtcacatagatagcaacgtcctactattaatatccttgattaaagaatgcacgcacagactccaatattaattctcccgaggatgcaacaaacagtattccactcgaggaaggaatatcttattggccatgttgtggcgctaaagggctctagaagaaactaaattaaccttgaaagtcccctcccttttcaccttgcccagttgggtgctctaagatgagtcgtcttcccaattccagtgtcattgcgaccttccgttatcgctgagcaccttgaatttcacgttgatcgactcgcttccttcttatagcaatgttgccatatccttatacatccgcaatgtcgaagttgcgaatgaagtcatagtagaacttaacggcgctcaagtggtcaaagatactcacatgctcatcgacagtgtgaatattgtccagtccccggctgatcgatggggtccacctaaacacattgcgggaaaggcctgatgataccgtcagtttgtatgatatgtggctacccagagtgaaacttactgagataatgcctagtatcggtattaccagtcatgacgtctccgactggaacgatagtcttatcttctgttgcaaagacgtgtcgaattgtacccgagaaaacatcccaaacaggaccactaacaggagacaccggtgcagcttcggcttttgtggctctgatgacaagagtgccattgtagtcaacttcatcacggcgctttagatcactgtgatgtagcatatcactgggagaaagctctgcaacataatcctgatattctttgtcgcctttgaatgcatccacctggagaccatacttctcaactacatccgcaatcacttgaacagccttgtgttgaacctgtaccggcttttcatggtgtgcaacgcgatagttgacagccagggtaacgacctccggcatggcattgattttcaccccgcctttgattagatcgatagcctgtgaggtttgaacaacgaaccggttcaacgggctagtgctggcgaattgaacagcaagtccatcaaagtcattgtttcgcagtagctcttcgatcttgggctgggtgttgggagaatatcgcgcttgacagatcagacgtttgtgaatggggctgtccttgatgatttgaggctggtacggattagcctcgagcgcaacaacaatctcagaaataattccgattcccgtatgcggtaaggggaccgaactatggccccccttggcatgaagctcgaagaagagattggaatggcccttttcagtgattgcagggtggacatatatggtattgtcatcaagaggtgtcgagcctaaaccgccctcgtcaaggataatagcaaaactgtcgtcaccatatctctccttgagtacctcactgatccgtgcagcaccttggttgagaccaacttcctcatcaaatccgaatgccaaaatgagagttcgtctaggtttccaatcagactcggacaaaagaccttctagggccgagaagatggctgtgagactgttcttatcatcggatgaaccccgaccccagatatattcgccatcaaaatgggcttcaaaaggtggataagtccatgtggatgcatcagccacgggaactacatcctgatgggcggtaaggagggttggcttcagagttggatccgagccttcaaatgtgtaaagcagcccgaaagtattgattttctctagctttccacgcttatgacttgaagtgatcagctgtgaggacagtttccatgatggacttctagcttacactgtgggatacgacttttgaagaacagggaaaagcttgtgaaacggaagccatcgctcatcctcgccgatttcgcctagatcgtcgtaggaaaccgacggaacctgcacaatggcctgatgacgttgtacctgtcttttcaacgcctcatctgacgagaacaagctcactgccgacggcaacccatcattggccggatcaagaatagggggtagatcgcatatgaaatcagaacccggattcccagctgtcatagaggtctggccaataaagggcagcacgaaagccgaagcaccagtaagggcatttgccaggaccatcaagcggaggcaccccatgtttttacgtgaatttccgggatcagcccactttcacgatgtcaattgatagatagataatgaaaaagaagagcgaaatcacaagactttgactaaaaggggccttttaaagaggggaaacgctgcgaagtaaaatgagcaacttttacaatgtactcgatgatgacatatcaccaacagcttacgacatgcatggatttcatgctaagccggtttcgatgtcgaggcagctttctcctctctcgaagtcgatatgaagcagctaatatcctctagccatggcgttatcatatcatatatggtctcaactattttccgctttaacatccttggcgcttttctctcgttgacaccgaatattatatttttgtgtatttaaagaagataccttgtcttatgaatagagtgggtaaagtttggaacattagcaactcataaatcctatatcattatgatgaaggatgaagcctaagataaagtgcggagtgaagtaggtacctttgatcagctcttgcgaggccgaactcggcttcccctcattgcaactttgaccccattcttatgccatatccaccatctacaatcagaacgacagtgataggtaaagcctgatagatagagatggccaagaagagccaagcataaaactctccaaacttagattgaaaggatctgctatcttccgccctacctgtccatttgtcattgtgaaatcccccagccctgtctagcagtcaaaatattggctgtatttgtccctaggttacaaaatgctcgtaaattatcgcgaacggcttataaatgtccgttatggcacatctttcctgttcgggtaaacccccggaaaaggtggatgcgcttcacctagctagaagaccatcttatgtacagagcggatggtttcctatctacgaccctctctaatgttgttctaatctgggccaagcattgcacaatttctattcattaccgaagccttggaaatacccggacgagtaagacttaagtaggaaacgattgacctcagcagctgcatcctttcagagaccaattctcaagccaacatgacaggaaaagaagcaaaggagctccctactgagactgttcagcccatagagatcaaaaatctcgcctcaattaataaagaggaagttgactctttcgacgagtcgcaatatgactttgattccgctgaattcaagaacatacccgagctagtgcggacggtcgttggtttcgaggacgacccagaacttccagtcttgaccttccgctcgattcttctatcagcactattttgcgcaatcggcagtattgtttctcaattatcttagtgagtttcgttggcacagattggcagcaaacggttcagcttacaacctactagctttcgaacgacatacgctccgtttccagtattctttgtcattctagcgtctgaccccctcggtcggttcatggcacgtgtactacctgcctatagggtgccgttgggaagattttcgttctctttaaacccgggcccttggtcgaacaaggagcacgcaattgttggcattgccgccaatgctggaagccagggtcaatgggctagtaagggatccaatctatcttgatatgccagaattactgatctcaaaagcctttctgcctacaaatgctgccttgtactataatatcactatgaacccagcagttgccttattctttggatgggtaggctcattcctcgacggactaaagtaacacgctaatttcagacagggttgttccttgcttggttttgcatttgctgcaatgggtaagtacttttggtatctgttactgaataaaaattgacctgtctagttcgcggagtcttgatcgatgatcccgaattcatatttcctctgtccttgcaacaagtgactctataccgaagcatggatgccaaaaacagacctgaccagaaaagagcgcgggagcaggttaaggtatgtatcctctcagtcatgattacaatcctttgaaacagctaattgaatattgtcaggtattttggatattactcctcgctacatttgtttggcaattcctaccggaatacctctttccctttgtggcatctctggctcccctctgctggtttgctagtcgcaaccacactgtcaacttcatcggagctgggcgcggtggcatgggattgctaaacataacccttgattggtccaacatcacttcggtggttatcacgtatccctacagtgtacaagtgattatcttcttggcgtttgtcttgacagtaagttaaaaggtctgtgtcaaaaggttgtcctctgatctgttccagtgttggattctgattcctattgcgtatttcgggaacctttgggggtcaccgacttttaacatcatgtccaatggggtattcatgaagaatgggacaacctatccgttcaatgatctaagtgggtatcttgctatgacatttcgggaatatgctgattattttcaagtctacctcgattccaacggcatgcaacactttaacgagacgaaatacgatgaagtaggccttgcctactctggagctcagtatacgtggcagatgttcatggtaagaattccgcattgttacaccccttcttttactgacattatcgcagtgggtagcctcgtatatgtcgtcttttgcttggtgcggtctgtttctaggcccaaagatataccgaatgtggaaggccagaaagcaggcaggatcttatcaccaggatagattaaggtatttacgcctggtgcctatcccatataggaatcctgttattgaccatttttagtcgcatcatccaacggtatcccggtatgacgaagtggtaagatcctctcgtccttctttacgattataactaaaaaggatggcagggaatgggctgcgcttactctgataccattcctaatgcttctgggtgttgttgtttccaagacagtctacatgcctatctggacgtactttgtggcattgggtttcggtgcagtatcgatgttaccgatgagcttcgtatatgcgatgtcgggcttctccataaaggttggatacttcaacgagcttgtttatggatgtaagttgatgtgagcttatgtcccattcctattccaactgactggactacttctacagatatgatcgatgcgaagggctcatcacggcacccattgggccaacttgcttatcgaattatctctggaaatgtgtggtacgatgctcgtactgttctagaagatcaaaaggtttgattatcgacaatgtcattcatgtgatagaagactgattattaattccagattgggcattaccttcacctacctccacgccaagtcattggaatccagattattgccaacatgctcgcactgccagtaaactatggcgttatgcgctgggtcatcgccaccaaattcgactatgtcagcggcaaggagaaagaccccctcggccagtggaccggtcaagatttccaatcgtacaacacagccggcatccagtatgctctcgttgggcctcgtaagctcttcgcttcggccttcttcagacccatcctctggggctttcttgcaggcgcacttgctcccggtgtgatgtggttattgcacaagaaattccctcgcgctcgtttcgatctgtggaatacgactatattctttgcatcagcagcagttttctatggtaatctcagtaccgggccttttacaacctttctcgtcggcacttttaccaacttctttctctatcgttataggagggttttctggaataagtgggcttatatcagtggtgcggcattggacactgggtttaacgcgaatctattgtttatctttatcttcttcgggacaaccgggaccaagatggttcattggtggggtaacaacgctgatagtatcgagagatgctttgccttgaagggatagggagtattatggtgacttatatagaacgaagcaattaggcagctcactacttgaaagcttgctccctgaacaagccccctgagcctgtggatgctgagctgcatccatcagattatgtcctgagatcacctgatctgtcaaaatatgaagctattcagagatcgagcagcatgaagtgattcaaattaactcaaccaccactaatagagataattcaattctggacatgtcatttaatgctaggtagcagagaatatctgattaattaaatgcgaccgatgtttaatactaactatggttcaattgtatgaagttggagtgaaatctacagattagcgacataccgcacaaacctacgatttaattttgatcctaccaattgagaaaacttctcttaacagatcagctgatctctaaatagcttcatcttgacagataaggtggtctctgaatagcatcatggtggtagttcattattcatggtctctgaatagtggcagatcgggtgactcggtgagggattgggtaatatggggctgaatataaaacagatcataaagtggcgataccgtaataaatgacactcgtattgaaaatggtgtgccgagagcgaccttcctaattaggttagacaactgtggtagtagtgattttcgactacggagtacaacatacaatgttgtatgcccacaatctgcaggacccttctcatcaactatatgcattatatatttctctcaagttgtatgtcgagtacatacgaccatagggtgtggaaaacagggcttcccgtccgctcagccgtacttaagccacacgccggtgagttagtagttgggtgggtgaccaccagcgaatcctcactgttgtatgtttttgttgttattatatataggatggggcgatgttatgatattgtgaatgtttaaagtatttcaaagtgctagttttaagtacggaatactagtttagaaaatccataagcttccgtaaccagataaaatctccatcactaataatcagatttccaggacctgacatagttaatcctttaagcctgataaatttaaatactagtaactacttgctgagggtttatatggcagaattgggtataaaaaggcggtaacttactggtagcctagaataaagaaatccacttagtatagatgagccccgcgttagccgcgaaattggataatcgaagaattagaaaaaaattccactttcttcctcctacttattatatgactttcattaatatgatattacaatttttggtagggctaagatttcacaatatgttctaggctataaaggtgtgatacggagactctgggccgggtgggctttgccgatgtctacttacacctccctaggccaacgtaggagttggcttaaaccgacatgctaccagatatgatacggagaggatcgcatggtttctaataggttaggtgagccgactaaccttggaagtacgatctagtacaggagttaggagtacccaagtgtgcagaatggtccgtacgggaccgcatgggcacgtaatggtcacatgacgaggcacatgctcgcacatgatcacatgacactgcgtagttaactaggtaagcgtcaagtaagaatcctaggtcgaatcttcgagaatagattttactcctattttttattttagtttctttaagctaataggaatgatactcacagggaattttgcgaaggtatagttcttattaccaatcgaagcctagtagaatgccaatattaagcttgttatcgatctacagtctatagattattctatacagtatattgtacaagctcacttttttcaacagaagaatttcgaaaagtatatagcagaaaagagcaaatagttcgaaaagctatctactataccaatcaatgtccaccttataacgataaagataagctctataagagtgagtattacgctcatttgataagtgtgatcagtttgattggtatgtgctatttgtactaggatatatgtataagtataggtaaatcagaagggctatagcgagtctacagggcgacaaagccacaataacgaattgaaccgaagatacatcatgtcttctagggctatatatagatgccaagtatcgaaatgtttccgtttcaacttgtaatcgtgtcactttagaaggtcagcgcgggcgtcacactacctagggtgattctcaccctgtcctatagcgcactcacccttctcacccctggtcgtgcgaccgtaaagcggcgctcacccaattctcacccagtctattattattgcactcggtcttatccaaaatcaaattctcttgttctattaatcccaaagtcagggttgtgttcgctcgcttcctatcgagcggcgttcttaggccactcttagcagcagcaagtgctctcctgacggtagagattgttacctgtgcgccaactcacgaaacaggagacccgtcatctcatcggggtagagactaggcttttccggcaaacgatcgcagagaacctccaacatcagtgaggtagtactacgcggtatactgctcgaataggagagagctctggtattaccgaatcgccgcaggttgctgcggatagtgttggcagaacgcgggctacatccggcggcctcagcggtctcagatgttgtcagtgatcaagatcatatcgcaaatgaattctcgagtgggaaggggtgaatttggcgccattctccctcgtggttgttcatctgctggtcgggctaaggtggtgtaagttactgcaactcagaagcagtagcccgattaggccggttgtcgtgatggtcccaaaagccctcgtattcggcactttagtctctagtaatgtagatagcttctttcttccttatgcaactcgagatttcctggaatactctattgcttcatagtagtcctctcggccttactcctctcatccgtttttggaaccttcagtccgcttactgacattactttggccatctttcataacttatcatccactaagtttagtccatattcccgaaagtaaaaccacatgcaatgtcttgggccacacattcaaaatgttaactagccctaaagaaccccccaccaccacctcatgttaaactacagtttgatcgtaaccatcctattctcgggtacaaacaaggattatgccagctttgggccactacaaggggttggtaaagtgcatcaaacgaatcagagaacacattgaaattagaagataaaagtgtatcccaggttctacagcatgaacacaaccaatatggaggctccccagtccctaaatctaccatgcactacagctaacgtgcagatgaatgacttggacccaaccggcttccaacgaatcacccttcatactcttcaccgatttatctaataatgtcgaccctctacacaccatcagagatggctttacaggagaaaaaagctgatcagtggtcaaccgggtgcaccgacatttcgccctcgtacgtgttaagtgtgcgatgaagtagcaataaaaccgagcacctgggccctgggcacaattctggtaaacaatagcgaacataaatacttcgatggctcctggcattccatgctttttttctgaaggctagttttgctcttcattaagtctcatcattactttgaaaaggctctgcaccagcatgttcaagctggccctatcccccgagcagccaaaagccatggctattcaaacccacatcgacggatctttgtcttctgtcttcatgaaacaatacaagcagaacgagtatgcgattctggcgagagccgtggccgatatgtgccaacaagcccttttaaaaaatggcataccccataagacccagagccgcgcgaaggagccggaaagcctccgaaaaaaaattgagcagcgtgagcgcaagaatggacgatacaaaagtctggaggatgttcatcacgatatcgtggatctcgccggggctcgcatcattcttgaaagatgggaagatcgccattttgtcaaggagataataaacgagacgttcaaagttcagaaagaggagttcaagaacgaaaagagtggctatgaagcagtacattatcgtgtccactctaagcaaaatggatggcagtgcggtccccatacaacggaggagccccttgttgaaatccaagtccagtcttggtacatggcgcaatgggccaatgttgagcacgatgctcagtataagacatctaagggtatgagtcgagagatgagcaacagccttggtgtttggctccaggtgtctaaactgaccgaattccttgccgaacaaaccaaagcattcaagaccaagcaagatgcgaaggacaaacgaaagttcaggagtaggaagcacatcggcaactatttggacaagtggttctcggatgatgatgggaatgccgccgactgggcaaggaatcagaaagagatgggatcttccaccgctttagaaatatatttggatgctcgtggatggaagactcctgagtctctaaatcgattgctctgcgagcactttggggccgaggcacaggatgaatactcagacgttgcagcaaaatatgcgggaatcgacttgaaccgtgtaatctatctaatggaccggatagtcctgaactgcggagaaaattgttctggggcctttgaaatccccaacaatcacgaggtacatgcctacaagatccaggtgattttgagtacgttcatctggatgaatcgtctctttctgccaacctatgggtggcagcgtttattcacgcgcattgaggaccaaaagaccgtgcgcgagggtattctcttgcttggaatgagcgcccggcagaattttgcggaagaaagctccttagccgatgatgaggtcatcaagctgaacaggttgtgggattggttttatgcaagtcgtgatcgaccgatcatgttggctttcacaatgtcgaaccagggggctattagagatgttcccaaagagaagaccgatctgcgaaatgcccttcggccactgattgcggccttgggtcggggtggggcttgagccttggcgttgacggccagtgagtagcagagccaaaaggtggagattaaagtgcgatgtctgcaaccgccgaaggttgtgtttttcctgttgtcttgtggcttatattcgtttcagttgacaagatatgtccatcgacagtcaaaatgctgcttataaatctctgcaacgattctgttgattgtttttttagcaaatggtggaaattaaaatagccaccagctctcggaaggtttgttgagattggtccctgcagttcctcacatcccatcacacaataaccatgtgacctgtcgatttcgagggcgcagtaacttcacgtgctagtaaacacagccgataggtgtccagaaaaaaagaaacccaaatgaataaaagatgagctgaagtagagttatcgctatgctgtaggatgtcaattgcgtgcaagtgtaaaaggtgctgatcttgaccacatcaatatagccaaagcccaacagaatcatgtttcaggctaaaacaaaacaggaggcaaacaatgatatgaaattggtaatgccgagatacacctgtaagtgaacatgatacaagcgtattatgatgaaaaataccgacgcgtatatttggccaggcaacctattctgcaaagtagtaatttcgcacatcaaatgaaaagtcgtcttttactgttctctgacagtaaaacttcttgaaattcccacaaaggttcgaatttttggactagcagtgccgtggatgcagttgtgacgagtggccatgtgtttctcgagttgggtgagcttggtgaagcaggcacgaggccgcagaaggtcacacgagaagactgcaagagcaatgcagggcaattcagctatgacgaggcctcgggactcaagcccagtcagaggagctgacacgactcaagcagaaggtttgattaatcaccacggtgagatgattattggagacttgctgacctgtcattggcatagggctcaatgaaattattgaacacctccgatttgaggctcttctgaacggttcccctccgcatgatatctccgaaggtcaaatcaaaagaatgaaggcaatactttcactggtggagaataatggttatcttggttcatcaacagccaaccgagcccttgacttttggatctggtgtgggcggatgcctgggcggtgggctttggttccagatcaaaacctctgggaagaatttttagaggaggacctgttatataagtctaaaggtcagtgcaatttcagagcaaagcaaggagagcaggggaggtacagagttaaaattatttttcattttcggttcaccaacattcttctatccaattagtttttgggatagggatctaaccttttacctgagactgatggagctaaccttgcctagatggctcaaatgcacgaacgcaggaattgtccgggttgtccacgtggatatctcccaattttggtgtcagcagaagacttgaatagctactcaaatgccacgccaagctcaatggtgagtatcagttgaaagtcattggtataccggaaaagttactgacatagtctaatgatcctaaggacaactcccgaaagagaagtcttgcagactccttgtatggaatacaatccaagaatgatggcaaagtggaatacaggtcggccaggaacatggtgggtgggagggacatatgaatggtagcatcgaaaagaggggtcacatagcaccccttgctgtctcatgcaggaaagcacgcagggcttgagaaacctcggcccattggatattcgcgtagaaagccaagtgcaagcgctttgtccgccgaaattgttacaagatgtgtgcccgtgtgccctatgatcctcccccctctcccccaaactatattagagtttggcttagtttgtaattaattcgctccatatttattttttgtcttcgtcaagcctctctacgtccctttgttccttttttttttgaagcctaacctacagaactctacgttcggctttaggtcgagtgttctagagacacagaagaaagcaagaagcaaagaaaaaccgatgatacgctatatgagtctcaaaacagatggaaaaagagaaaacgaaaaaacggttctatctaccctgatcccgtcgcgtgctcactcgacatgggctttgacgcagccttagtaggagcgcaaagagtttccgatagcgttgagtatgtatattcttagtataaggaaggctcaaccacttttgcttattggtggtcattcggtgtccaccacgttgatcctccagctcctgatcaccttttactctttggatgaatcacaattaggctgtccaataagcatttctcttcaattaccccaactcgtgaaaagtaattaagtagacgccagagtacagttcctgtttactttctacaccataagacttctagggctctttaaaaccttgatccaactatacagtagctgtatctcccccgtaaagtataatgatccagtgtacgggctgtgagaacgaatatgatagaaaatcgaaccctcagggtgaggttggcgcgtagcatatgcttcggcgaatgaagctgttaaattctaggaataagattatattactgccccaatagctgcggatactaaaccgaggcgtaataaatatagtaaggtagacgtaggtgatataacacgtgagtatctcttgtgccgtggctgacaggccatctggataaggtatcagtttgtttatttttgtgaatccccgccgaaataagcaaatagtagaagatcgattctcgggtttactgagtcgtgcctttcctccacatcccttgaagcagctgcaatacaagcttaataggaccagcggctcatttgctatgggtgttggagaaatattatgttctatagggtggccccaaccaaagtagaacatggaagagcaaattgaccaccactaggaccatttgggacaggcttattcatcgttcacccaattccccctagtatttgtacggtattccgggcacgttcggaagtacggtgttgcaacacgccgaagcttatttgtatagacccctgagatcattcgaccgatctttaacacctacaatcaatcacctgattctattggacatgttcagtactagccagtacatcaattcctcatcctgacagtatataaaaatcacactctcaagtactcaattggctatgcccatactagtccgtactgtaacgaccacgtttcgacaatagagttatgtgggtcacgacccggtaatatagatacaggtctaacctagatacaggtctaaccctaatgcatgagtagtgcgtatcagggtgacaggacaatcccatcagtacaggggatccaacaccccattgagctatttcaacactaggctgaatgaggatagggttcagggggtcatgggtgactcatatcatcccccaatgcttgtcaaaccccgaaacaactcaggccaacatctgactatctgttattattgccaagatgctggacagactcccactagaaattttgcacatggttatgcaccatgtgagatcttggaacccttcgcaaggtctgacacatctgacagttaataggtgccaagcatcaaggacctcgtgcttttgtctgaggtatctaaaaagctgcatcggatcgttttgcccattatctacgccaaagtgtacatcccagtacccgagcatcacttagaccaggtgacgattagtcccatgaagacctgtttcaagggagacggatccagagataccttcaatagtcttgaattcttgaaaaatgtgcaactggtcgctccattcaatgacctcagaaggaacaggtgctaccggggcgaagtaccactcctaccagtcgaatatgatgactatctcggcgacgaggaagagtttgacatgtgggaagaggagaaaaacagacgacgtcctcatgacgtgatgatgactaatcttgccaaagcactgaaagaacttctctctcatatccccaaaaatactttgagaggcttttcgtatgctctttttcaccactcatttaacacaagaactgtcgtgctaacaatccatagttggaatctgggatgctgcgttcctgaccaagtatttggtgaagaaggttttctgaatttcgaccagaatgcaatccaagatctgtcactgattacggacgggacatgtccaagtccggaatgggagcatctcgagggtctctctgacctccggcacctgcggcgcttgtcgtggaaaggtctaaaccccaaccgtagccaaatacttcttcgtcacaccctgatggcgaattgtgcacaccttgaatgtctagaactagagccgattgggtgtggagaagtttacgtgcacgttgaagaaatcattggcgacacggatgtactaagggatgtattccatttcaataatctccgacatctgtctttgaccaaggttgcgctcgctgcaccgtgtgcacgaatggcaactacattttgcatagagcaattgcaatcattgaaattgcgtgattgtcaccaaacactggaatttcttgagggacttacggagtcatctcacatcatcaaactacggtcatttgaggttgccatcgacgaggaagcgtatcttcaaacttattacgaaagcaacaagccacatccgatcgaatcgttcctgctgtcttttcagggtcttgaagaactgtcgatttcaatttcgaacacgttccacccggtaaatcctatcactgaccctatctgccaccatcgagacacactaagacggttggtatatcacgaggaggggaacgagattcacagggaaagtgaaggcccgcttgcatggaaactcttcaccaaccgcatagttgagggaatgaatttggagtgcattggattctgcttatctccttctcttctggtacggctggctttcccaggtcacattatattgtttgtctattcttacacagccttcttttcagataccgaggcttggaagaagcatcgcggctcaaacagttaagctcttgcattttagggaacctggatctggatgtgtgccacacaccaacgctctgtttgagtttgcgaactgggcatttggtccacaaggacttgataatctcttgatcattgcacatggtgatttttcgcatggtaatcggtttgagcggactcagatccttatgggccgtaattgtgagcaatccagtggatattttcgggtcatatctcgagatcagcgcgacttctggctcaatcggattgatggcgcacatgagatgttgtgtgtttgtccacaggaggttaccttgggcgccgggcgtaatttgtgggacatggacatggaggtgaattcggacatggaggtgaattcggacatggaggtgaattcggacatggaggtgaattcggacatggaggtgaattcggacacggaggaggattcggacatggaggtagatttttatgtcgaaatagataccgatagctcaaattcggactaataaaaaaaattcttgaccccaattacgtcggctcctcgatcaagcccacaaagttctatcaagacgtgaaaggatcgaatcccggagcattgtccctacacaccgatcaagaaaagtgggcgggagaggtttcggtctacactagggagatcactgatgcagactttgtccagcccgcagcattgagggaggttattggccgggagcctggtcaccaggataggcttattgacaatctcgtttccagtgataagggtgtaaagtacccccaattgcgcaaagctgtctatagtatgtgagccttactgctatattcgaagagatccgcccactgcagtgcagtcttacactaacactgaatataggcctttttagtcgagtcaacaaggaccttgggtcgaggttgcaagagcgtactgaagcaacaatcaaggccgcatgagatcgatctccttctctagtatctctgctgctctaccaacgtgcttgtgtctttggaaggcaattccaacgcgattggatagttttgatatgatttgtcttttatggatgataaatcgacagtagcaatacaatctgataattggctcccttatatgactaactcacacaatatttgaattttctgtttttcttttttttcttttttttctttttttcttttttttttttttttttggcattggtcgttccacagaaccattgttgggcaaacgacttggccgctgattgcactacggagcgatgcgtgtggcgaatgacacaccgcgattggctaagaaccaatcttctattagataagtcttgttgcataacaccacatgcagccaaattctttggcacataccgccaccagagcccagtggatttccgaatcgcactttagataatcgagcacatcatgttctccatctccacaggtgaagattccaaggcggcggggctgctcaaacactggtggcgggcggggtagtacaaagcgcgtatttattggaagaacagggcgtattccattgccaggctgctcacccggattattcaagtgtggactacctgtccgcctttaatgcgttcctcgattggctacgagttctcttaggctagcagtatggattactattgcggtactcaataatgttgagaaaaattgttcacttaaacttttggtgcaaatacaagtcctgagcaatagagttgcaggggtgcaatatctgaaacttgcccattttcaggacgaaccgctttgcatctccaataaacgaatacacctcgtgatcctagtcacagtaacagttggtgtgtaaattcatacagaaactgcatatatatgactcacatctgtaattggctgcgataaaaataacccagcctcgtctcgatttgactacgatttaaatctccttaagctctgtgagtccgtgttccacgtactaacccgtttaaaactaatttgcttaccatagtcacttgattcatgaggttctctcaagtgttgtccttcctagctggtttaggaatggctctggtcgatgctaaaagaccctctggaagtaggtaacatctttcgcgctttatgaaccatggctaaaggtagattacaaggccattgcagtagctacaaatcctgtgtggactaaagcttagagaattgtaaatcgagggatcgtcggtatgtccaatgctctatactcataacgtaacctaccagctagccatattaaagctaaatgcggcttgtccttattacgctagtcatcccgttctgtatttgacatgccatacaaaaacgaacccagcgcgaggaagaaactgccgacgttccaagccgtgccccattccccaaaggtgagcttagcagcaatgagagcagagaaaagtgaagccatcgtaaaaattatcatggtataccgggacttgatctcccaagcttcctttatcaagattccacggaacttcatctctcggagttttgggcgatgccactcattcatcatcatgagaatatcactattgccctaagattaatatacagacaacaagccaagcagtggttatctttcatgaacacttacctgtgtccataaattaccttctcgccctgaagaaagtcattcaaggatgcgagcttgggattagaaaatgcaagtttcataaggggacgtgtttcaaggttttcaagctgtctttcggcctcgaacttcgttttctcaggacaatccacgtctatatagtatgacgcacaggtttcgaaacagtctattttccctgtggatagattgtatgggcatgggtattcatgttcctgataattttcaatgatgctttgcagtctccttttctcgacttgcaagtccttcgttttatacattccgacaaactccacagctcctccggggcttcgtaagttcatacccgcaatagaaatctaagaatatttgtcagcaaatttagtagaaaactcttattctcggaacagacctcgactagttcagcgcttttgacaccaggaaaaggaatgtatcttctccaccaacatctatgagagcaccatgcctgcctgattgcttcccatatgatagtctcgtcggctgaatctgagactgtgactggcctaaccgaacactcatattctcctccccagcaaagaagaacacaaacattagcgccatctccaagcattgcctgtaactcagtccccaaagcatttttgcgagatgtgtgggcagcttcacggctgtctctcgtagtggactcgaactcaaagtccgaactttgcacttctgcttccgccctatgtgaatttctatatccacgggtatcaaggcgatggggtcgtatcgttcgacctgcaagtttttgtggtttcgtttccagtggtgaatcttccctgatgcgggcctggcgggtatgatgggcaattgtaaatggcaaagaaggtatttcgagtataaaatatgacaaggttctctgaaccagggtaggatatcgacgattatgatctcgcgatgttggaaaataacctcggttgaagttgtatacaggttcgtcgggtacggcctcttcgagacgactcggcattaaatgagctctttccggcaccaggaggttattcatttctgcgctaaaaattttgaaaaaaaaaaccttaaatgtaagccatccactgttggaagtaaggaagtgttgataaataagctatatcatcgcgaaccaacgatgaggctgagttatttaccccgcaccttcgtcaatcttgcaggcgcctaacgtgtgccagcaaggtttttgcagcagtattaatacgatggctgataaaactgcggtcagattatttttgggcaacctactatgaatctgcggaccacagcccgtcctataattagaccggccccagcgtgagatcaaccactaccctaaccatgctctcgaatccgtgggctgtggaaggcaaagctgagcctgtcaagtccaagaaggccacagccgccccatccaggttcgtagaatgcacttatcattggctcatcgccttggccatatcagcctcgcaatcagcctcgcaataatcgatacgctagatctcatgcctacatatctgagtgcgctagtttcagattgcaggcatattacttaggatgcggtgaccggagaacaatggctggattgtttttccaagaatcgatccctaatttatccgtagaccaagatcttgggtactatttgtgtcacaattttactccaaaaatgagtattaggcagccgtctccctgcaagctggattgtagggatcagttccaggtttctacggtattctgatagatccagctgtcaaattgcggggctgtgaataggctaattagttggaagaaatgaaattgttgaggctatgatggaattgctattatggtgaccttaagcagtctaacactatggctagaagtgctctgaagtataaattatggagctagacatgaatgcatgtgatgatgtgcataatcctttctgaagttcatcgtcacctagagattcttttcggttctctgaactggtgtaggatagtgggagacctagtagagtgagctccggtaatgaccgatatttctttcgaggcttactagttgagaagcaaagaaggaccagaatcctgatgtatccgccgggaaataaaagacgagacgaagggggaacttctaccaccgtcgtttgttgcccatgccggcgataaaggaaaatataccggcctacgtcgtgcgacacggttccagttcctcgatgaacgtactgatattattggtagtggagatttttgtcgcaaaaacccctgcgacactggtttttgcgggcgagagctgggtgacaatcataccttccatccaatgcaaacatcccaaataatttataactgtttttcaggaacgaaggggcatcacgtatcattgagacagttgggacaggatcgatactccgtgcgaaatggtgtgcccagatttgtagtgagcgctaattggcccgtgagataagtcctgtcgagtgtgttcagctgaaggggtcaacgcagtcagtgatcgcgcgacgggtgattctcgccctgattctcgccctgattctcgccctgtctatagtgcactcacccttgtcacccccggtaaagcggcgcacacccatttctcactcgggcgacacccaccgaactgaactatttaccgcgcttaagccgaacaccggcagatcagtagttaagtgaatgattaatttatatttcaatcagacacctcttccactttcgttgaaagtctcagaaactcggtaaacagtcttgtagaacttacagtcaccgaaaaaagatgttggaagaaagaaacgggtaaaggaaaaaaatgaaatgtatcttcgttggtcacaacttcaaaaattgagtgtttgacaacatttggccaagcttcaacgggttgacaggtcgagcacccgcacatcctaccgtgacctcctcgctttctgcagtctagatggacagacccacacaactcaacacaaccagcacaataaggccaggaaatcaagtccatcatttttagggatggaattgtaggcgcttttcggtgattcaaggttgagtcgctcacaaatgagatgatcacaacacgaaatatgagctctgtcaatgcggattgcgtatctcccacaaggtctcaatttaagagggccgtgaaggattcaacagtcagccaatgcttgaccgactctgcatcccttttccccaacgccactcttactcgtctctcttgctgagcacgtaaacgcatcaaaaatgtcgctgcaaatggttgctgtaaaagaaagacgtgggtttcaacaggcctcaatcaagagaggtgtccttcaacgcttcctaccaagttggtaagtgaagagaaacctatgaatacgtcctctacccctgcaatttgctctacgatttattcactcgattctgcaaagtcgagcaggcttgtgtctgacgcactcgataagttcttcccctttgatcgagtactggaatttataccgtactaacatttatagtatacatcgtagaccagcaaatcagacagttccagtactgtaagagacgtgattccaagcagattcactgtcccattcacgccagccgatcgaagatacgagatttggattagctggtcaaggtgtctatgcgaagacgtctctgctatagcgagctgatctactgtcgcggctccggttgaccacagatttgaagtgcaactgctcacactgtaggtatatgagcccacaagtccttcaaactgcactgacccgaaagacgcgggacaaccagatccgtggacgttcgaccacaatgcaccagggcaagggcaacagcttgttgtcgtctcttcatccctggtcttgaccatcagaacatgtgagtcgtggaatttcacgctgatgtactggctaataattgacagtgaacctttgggggctcaccagagcggccctgttaaccctgcagcgcatgacgccaggtcgagcggggaacggaatccgacagtcataacaaggagaataagatgcatccaaagacaaaacagcttcacaacgcgcgcagcgaacacccgacgagcttgcaagaattggaacatggcaacgcaagcaggggcgtgtttcaagcacaggagacagaaaggaaagccgacaagcaggacatctcggtggttgaatggctgcagatagacgaacttggcgcccacagtcacagcaaggccgattagataacattttggaacaaggagacaaaagcaacaagaggggcaaatacaggagagaacatactgactggaaatcgtggtggtaataaacagcacgacgttgcaataaaatgaaggacaaggtgcagaagacgaagcaatcatacctgctcaacatgcataagtatgcggagaaaaccctagaaccctaaagccaagaccatctaatccgaaaaaagcgacaataatgcaggtaccggtgggcaggaagagcgaataagcgacgtgcgtggcagaacagtccatacgtagttaagccacctctttttgcaccgtctcgcgcacacgtacatccgtgttgactattccctttctctcacttccttcgtttcagggcatttcggccatgtattatctcgtaatttcaatacgtctgacacctctattcccctctcccgaagcagctttcctcggtaggcgcacttaacaatcaatcgcgagtggtccaaccaaagatggctccaaaccttgctccttccaagcatgagcttatctacgacatgatccacagtggcgaacgatctatcactaagatggcactggccgctggttgcaacaagagcaccatctggagaatctcttccaatataagaatgtttggcaccgtcaaagcaccgccaattaaaggcggacgaccccgtagtatcactccactcatactcgaggctttatgcgaccatctgattgaaaagcctgccttatatctggacgaaatggtgatttttttatgggacgaattcgctcttcaaacaacgaaatcgagcatcagtcgcgcccttaagtccaaaggctggtcaaagaagactgctcgggtcaaggcacgataacgcgaccttgaccttcgggacgagtaccatcattttatctcagacttcaagtcttaccaccttgtctatgtcgacgaatctggatgtgataaaaggataggcttccggcgaacgggttggtcccctcttggtactgcaccggtccaagtgtcgaaatttcatcgtgatcagcgctatcagattctgcctgcgtatgcgcaagacggcattgttttgtctcgagtgtttaagggttcaaccgacgcctccgtctttgaagattttatcgagcagcttctccagcactgtgggaaatggcccgagccaaagtctgtgctggtgatggataacgcgtcgtttcatcactcggacagaattaaacagatgtgctcagaagctggcgtaaagctagtgtatttgcctccatattctcctgatttgaatcctattgaggagtattttgctgagctgaaggcctttatccggcgtaattggcaatcctacgaagaaaacccagctcaaggattcgataacttcctcgaatggtgtgttgacgttgttggtgcgaggcagaagagcgcggagggacattttcggcacgctggcctagctgtagagatatagcgctactgcggcagcagggttcgggactaacctcacgggcaaactagaacggattcgtttacggacattattgcgaaccatattgtattctgggctcctgcaacattcggatatacgaactgcatatattcttcgacatgtcaatgtcatcgtaccaatttctaatgcactgacagggtatctaaccacccgccaagtcgtaagcctgtaagatatcccaaatgtgtcgatccgtcttctctgacatctagctcctccatatcacgaaggacccgctcaatatattcgccagcgccgctaaggttcataataagtgcaatggcgcggtggacaccgagaagccggggtgatggcggatctaccgtgcgatgaggacttagggtaagcgaccgtgtgacgggaaacaaggggtcacgtaagaaaggactgcgttctgtcgagtcaatcctatactggtgtcgtgtgccagtgcgttcgaaatagatcttgaattcgccgaatagccggtggtagtccagcgttaaagtgagggcgttcatgggactgtcaattttgggtccatcaataagatggattattccgggatcgaacatgtccaagatccgaagagcatttttctttgaatcgctctgtgcataacattagcaccgtcaaaataccaatcccaataatcgggcataccaaatcggattcaccagaagctaccgtcgtcagacaatgagggagaatgtgggcaacctccaagtattgaaattgatcgctggactcatccttcaataggtttccgtcatcatcagcacaagattccgaattctcctcgaaccgctttctggcttctgctctatcgaatttccgagacactacacagcggtggcggtcgcgcataagacatttctggcgcaaaacagatacacgttgcctcgttccggtcggtgttgagctctgcagcgatgataacgacgtgggcgttggttgtggtgtcttgactgatgatgctctaactataactgcgaattagcatatactcactagagatcaagcatatgtatatgtaaggaattaacgaacggggaaggagaaaattttcaacgataaactcagcaaacttttccaggactccatgaagcttgtttatttgttctggttcccatgaagaaaatccctcgaagaataccaaggcgtgagtaatctcagaatcaacggcatgtccttcatcagaacgcaggtcctcatagatgtatgtgaggaagaaagtcataaaggtatccggcgatgtaacgtgctcgagagtagcctggataagtgccgcaggccgatagcccttccgcccggtcttctcggagccataatgctgtacaagcgtgatcactaggttccttgccgactcatgctgttgtggtgttaatgataagggtattgagaagtccaaaaccccctctagggaggactggtgacggtgagtcgccatcgctgggaacttgcgagccttagcgtgaggggcgagtaagatggtggaggaggcatgtgatgagctgactcatcacgggtcaaggtcggcccgacagaatctccacagaacgcaaaggtagcgaagtgcattatacgggtgcactaataggatcggtagcaggcttcgagtgggaaacttaatcaagtcccaatattggcaaagaaacaatatggcttaggtggatatcttctacaggcggaaaactcacatgctcctggtgttcaacggtgttttatgttcaacgttgatgtgaacgttgattcaactttctgacatcattcaccacccgtatatcgcccaaggtgctggaatgagaacactcaaaaaatactatcaggtcggcacagtaccaacaaattatgacaaagaagttaaagtctccagagctcctggaagctcaaaacagaccctcggccggtcggatctttatcgtggcagcgcggcgcggctgaaccatcgccctctaacaacccccaagtcgtgagaaatgggactcccttccacacgccctatgagcaacaataatttggcagccatgttcctcctgggaatatgccctaaataaattggaggctcgagcatcatgtggatacagcaactggattaaaatatccttgattcgatcgtgcgtgtacgtaccactattgtggccatatattgacatccatagtcctcctaggagccggcgctgataataataacccgcaaaaccttgactgtggatggtgggcatgaccgcttcagcccgaaacatttaaaaggttataattgtccttacggttgatgctttcttgtccatcttttgctccaataacttgccagtacaacaccattactaacgaagccaatcaatcatggattataacctatcacaggttccaaagaagtccaataccccagacacagaaggccataatggacgtatatgccaaactggtatagttattttagatccccttctcgaggaatccatcgactaatatacctatttcatgaaggcaatgaattggctgaaaacttctgttgtgtcaatggtctattcatctacgggaatcgcagctatataagccaggttttacaaccgcctgttggctaatccactggccctgtagctatagaggcagttacttccgttggtacctctcttggtagctcaagggcctctacgttgtctccaagcgttataagggctgaaaaccaagacctgccccctctgaacgtgaaaaagagagcagccgaattttcaactgtcctacgaaagcgacgccggtatttatactctacctcataaataccgggccacttacaactggcgtatcaaaagagacccctatgccttataaaaattagtaggaaaatggtcaatggtacaatttaatacctataaacgctatccgaccgcatcttgatctgcgataccatttcccctagggagtgggccactatgtatctcgccacctaattgctacagagtaggtacgaagagatcatcgtgaggaaagagatggaaatagacgctgtgcccgattttgattcaccactaacacagccagaagagaagtgccggaagtgtgctgctgcagacgaggagcggctgtatgactgagacgtaccccgttctttttaccttgtcggctatattttgatagtgtaaccggtcatttgaacttgaggagcaattatagtgttatgcaaccgttaatcggcatttgagagcctgttgagctctaaatctatcagtatatgactaagggacttctaggtgcgaaggatttgaacggtttcctgtgcgatgtcactacgcttaggaataagaaagaaatgtacaaaaccagctgcatcttgatctccaattaatgtaatatattagagaaatcagatagcgtgtgcgaggccaattgcggatagtaatgaagaaatagcaatttcgtaagttaaattgcctcgaatgtcaaaatcagccactccttacattatttaacccgcttccttcgtaatggtgcaatagctccgtgccctacaagtatcgaaatatttgtgctattctgttaatcagcttatggctgctggtcctgataactcggcagtttggctgtcactttgagtctaaatgtcagcatattaatccaagtgactcattatggcattagttgtagactatattaaactgtagtattggtaagacaggtaattctagaacgccgaggcctaaaccagctgtgctagtattcgtccgagaattttgagagagcgactcgccctgctgaaaagcgagcttctaagccaaaggtatacctagccataaataagtctactggattatctctctttacctggctaatatggtcgttgcagcgttaactagatgctggtcgtatggaagttgcgagtgattattatatggctatgtaagtggaactctgtgcaacgtaataatcactggtaagtttgccactttatggacctactaattattgtaataaccatactatgtctgatccgatgcgctcgttgacttatgagcgaaatatgaggccgctattataaagaagctgccgcagactctggctcgcttgatagcttccgtctctttatttttggcgcgttgtcggttataggaaacctagaatctgtccgtggatatcattccctagcgctgttaagggtaataagattctgaggaagttgagttatgttgagtagtgcggttatttgtcgattcgtatggaatccttaattagctcgagattcatgttcgtgatggctgtgcagcttattgttagttggaaaaagatacatatgccgtcaacagtttgtatgtaagcgctgtggctcatcggccttatcttacgatagtcagtcgaagctgccatctcctatcatagctgagagtcgaacccgtaacaccgcgcgtataaaacaaatggaattccactttctctcttagttcttgcacattttggacccgagaaaacactgtcttgttatcatgttatccaacctattgaaagataacaatatgatatgtgaccttggtactatcaaagctcaatctcagctccctatttcgatgtcggcccccaccacccgcgagagtcatacggcggccactacgaaactaacagaacctcaccgccgcggtagattgaaggttgtcacggggcctcccaaaagcctttgcctaccccacttgtgtggcctggagaatatcgcatccgtcctgattgtaagacaggagtcaccgtgggatacctatcggaaagtcattacgtatgagaatgctggcaaagttacaattgccacacgccgcactcgcccgtctcgcatggtagccatccggacatacaggaaagagaatgctcgaagattgatttacagattcggacgcctagaaaacaggaacgttctctccttacatgaatgctacatgcacgaagatctcgcgttcttcttagttgacgacttgccgctgacgctggcgcatgttgccgcttttccatctgtttatcctagcgagacagaattgggatccattatctgccaggttggtccctcatgcccttcgatgagctgttctgacattttagatcctggatggtgcctgctacttatcttcatttggccttacgaaccaatcactggcctgtggtgacatattatttggcattgacgggatcatcaagataagtttgttgacggccgtatccttgcattatctgactaacatttcgcagcaagcttggacctttatatagattgcacgccaaagcaatccgaaatcgcatatattgtggctcttccgtcaatcatgatgcggctcatgcagaaatatgacaaagatcgcacacgtctgaaaataccacatatacgacgatagaactctttgcgtcgtatgtagaggctctcaacattacaacactcggctaactggatcactatactagacatgctatttttcccacctctaagagcatcttcaataaggagagaaatgcagtattgtccagggaaatgaaatatcgttgcagttgttgaaaaaaacaagtggcaacatataattcaggacaggcggctggcactccagcgcatcactcatgaggccgaaggtcaggccatagggatacaaaaatcccgagatgttttgcaaggacaaaagtctttccttcagaccttgagaggagtcatatccgtacttgaggcctcccttacacaccgccacccgccacccaaccaaaagaactttacttgcctatattcatatcttcttcttcccagacggggagacattttaagtcccgtgttcttcagttgagtaagacctacggacacttacccctcccacataataggttgaccaacgggttcaatagtatggttcgagaggctcactagcgggcttttacagtatgagccccggtccccaaaagcgcccagacttgcagcgtcactttcccaaagggggagtggaaatatggtgcgaatgcgtatgaaaatggaaaagagccgttcttccctcgcctttaggcagatacatgatatttctggtgtgcatcttctcagtttgtaccatttcatgctgacttacagacaccactctgaactgtcagacggacccagctttccctcatcttggaatagtgttggtcctcagtaaaaagcttggatgaagtacggaagacgcctccaatgggacgaacgcacggcatctggatccttgatcgatttagatctaagacagtagaagggcccctgcccatgcacctcagcctaccatctccgttctagaaccccaaacaagaggcggaacctcaaaaacattttgtcgccgataacatgccctgagcacgtcagttttatatgacagttccagtaacgattgttcctggaccagcggtcaatgcgtgataatttttgagcggcttaggctgggctgtaggcatcttagcggtgttcggatgatacttgaatggtgcttgaattcttgaaaatgatcatgagaggaatctatccattttaatactcgaaaggtcctttgtgactgaagatgacctattatatcttatggtcttggataatgtgggttcaatatgcattgttaatatctaaaagagatacataaagggtgtagattaaaacctccccgaccaccaccccaaaagactacatacactcaactggaagcatttagctttatagttcatcatcctctccgtcaaagtgaatattccatccatatgtcgggcccacacaatatgcgctcccaacgagcaacttggagttacaactgtccgcattcagggatggattcacttccaagaacaagctccaaggaatcgattcttgaacacaaatcgcggtgcaggttacttcaagctcctcattgctcacaacgtgccatttgccacaccgcagagttgttccattggcgacaggcacgtcatcgggcggtgtaatttccggaatggcgtaaccattggcatagtctggcgtagtcgtatccgtgtctggagcatcacccgttgagtttccggcctgcgggcccagacagatgacatgtccgtaagctacgtcgctgttcatgtgcaggtttgtacactggttgttgatccacgagttatacttcttcaaagtgaggccgtccttgtatccgacattttgggccttttcgatagaactgcaggtatcgcctgtttgaagagtatagatattgtcgcactggaaagggatgcagatcttcgtgcctgcgggaatatcgttacagtctctcaaattgacgttgcccatgaaaagagcagcagaggcgaccctgtgtgtctgagaaatcgagtcgcaagtgtctcctattatagaagtataagtgacatccgaggcacagaagtcggtggttggctcatagggatcgatgactggcgtcaaagggtctgggatatccgtgggcacagtgagtccgcactcggagttaatttcttgtagctgtgattgccagacttcactgtagtaggagtagggagtggattgcatctttttgtaacggtccactctgcaaaacgagcaaagctcgtcggttgactcgtcaaaggatgtttgtttattcaggacatctgttggcaaagtaatttgggttagaaatattgaataattcgcaaactcgagcgtgatatcgaacttaccaccgcaatacttcccagtatcggggtctttaacacaggactgattccacgacgcccagaacctacctcccctgagagtaagcgggaagttggtttggtcgacactggcacagttgtctgtgacatggtcgaaccacgacttgatggagacttcgcattcggcagagcagacctgcccagtgagcgtgtcattttcaaagccgccataccaacgagcaacttgaaacttttgggcatcatcagggcagtcgatcacttgcgtgagcgcggactgacaagatgacggaagagtgttcagcaagtttgcatcatattggtcctcatataggtaaaacccggtgaagttgcgtcggcctataatatcgttctcggcacggaaccaacctagcaaagaggaagtgtatccgttcttagcatctctggaccagatcgctgtttcaccaagggggctaattgattggacaattgcctttgtaacaagattgaccagccaaataccactgctttgctccacatggaaccctttgtcttgacagttgttcgtttgcaagcaaccctgagagtatgacctgaaccaactatagaggcctaggaaggaagatttagatataagcgcatcatcacaaaccggttcgaaaatatataaaacatacctgccccaaggatagagatagattccgagtccacaatcctcactgcccacgagctagtgcacgtatcgcaatcaacatcctcgggatcatcagggaatctcccaggcgtgaaaggttctggcattggaggactaggctggaaataaggcgattctgtttgaatcatccccataaccaagtcctttgctccagacagctgatactggtagaaaacactatgctcagacgctgtaccatacatccacgtaggtccttggctttccacaagaatgcctcgtgccacgtaaatatcgatctgatcctgtgaaatcgcgtcaagatcgtggtctgcaacccatgcccacatattctccatataagctgaggcttgtttggtaatgcgaagcaagagcgacccggcaatacaatccttacgcagtgaggaagctttcttgggacaattttctgcctggagatgggaccctatagcgccacccacgcggaaatgagaatctttttgatattagcaaggctcttggtatagggagtaacctacgtaccccaaattccggcagatccttgagtggattcatggacattccactccatgagaacagctcctgctgtaggcccagatgcagtaaacatcatattttgaatctcgagaattccaacatctccctccttgccaacttgaacagccacacggggattctccatatcctcaaatctgctaccagttgccatgatttgcggccaagcctgaccaattattcgggacccgagtggtacatgaatggtatccttaatcgtatagactccatagggaatatagacaaccgaggagatattcgccgcaaaggccaaaacactgtttaaagctgctgtgtcgtccgtgactccgtcgccctttacgccgtaggccttcacatcgaacacttgtccaccacccagatcgtaatactggggacggcgcctggtgaagaagttaaatgtctcaccagcataagacttacttccagttaacgaccttttgcgactgatagatggcaattgagtctgttgggcgaaatgaagcccagtatcgtcagcataaaggccaaacccccaagcgtcaaccatgacttcatctccgccagccaagagaggttcagtacgggtatcggcaataatggccttttggacattgaaaaagcccacgttctgtaaaagaactgctgtagagttttcctggtgtaaagatgtgcggataccggtcggtgtgttggctatgatagcatcaactaggatataagaaccaacagactggccatcacttgttggcccgccagcctagtaggaattagagaaatatgggaaaatagaaatagcaaaacggtactgacgcctccaacgacaacgattccagttccacacgactcgatgacgacatcttgcatcgtccatgcccagtcccagtgaacctgaaccgctgttttgcagttcacgaacactagttcgcttgtggtaaattgttgattaccaagatatgcgctgccttgtgtcagatggcagcttctcgggtgctgtgttgtctgattcttacccaaaatttccacccacaaaggtaagattgcccataaagcctccgcttccgttctccatgtagataccctttcttgcatcagcctggacataaaaaaatagggaataatggtgatgttacctgctgcgtatttccatctgcttgagacatatagaagtctatattctcaagagtggttccctgagcgacttgccaatggatagcgcagacgtaggcgttagggtcagtgtgggtaatatccatcttgaagttgcgaacactacgcaggaagttgttcgtattcagatacctgaatatatgtatggtgttagaatattttatattcaaagcatatatgctcgtcttaccattcctctgaatctgcaacatagacatcggaggtgatcacgcctagcccaacgaaactcgcagcagcaaggatagttgggtagtccatgggctataattggcaagaaagggtcagagccagttgaatcaatgatggaaaatggcaggcatcttacatcgccgaggaattgagtgttgtagtactgtataaggggactgctgatgagataggttccaggaggaaagaagactactgcgggatagatcgtactggagccacaattgactccacagcggccgccatccgagatcgccttattgatcgcaacttggaaattaattagagaaacaatttctctctactgtgagatggcgggccacttaccagtgtcatcagtcacaccatctccctttgcgccgtagtctttcacatttctccagacctgcgaacagtttaataaacttcccacgcggatataaattgagacttgatcaccttgtacccgcttggagcgaatgggctatttcctctctgttcgaggtttgccagccagtagttggaaccagaagtagcacgcttttgtaaactagcctgatgggggccttccgcaatctgatactctattccattatccgcaacgtactcaaatagtccattcgcatactggagacgctgcggaggcctgttggtgtcgttggactttgttccatattttgctcgaacctgtgcggacagggctgcctcctctccagtagaaggggatggtggtgaagactctgctagcacacgagcagcttcggcaagatcttccgggatcgtgtaagcaaagctcttttttgttgcggtgcttattttgtcgcggcgtttcgttggagaaccagagcgggaagtattcgcaacagaaacggaaagcttagccacggcatctttcgaataatccaggggaggggcaaactctcttctctcagagcctttggctgtatcatccagaatgtagttgttgaaattgatattgtcgatgcgcagcttattgatgactgatagcgcttccaaggcctcagagactttctggacagcagcagtatctccaaggtggttcatattagcggccggggtagatttcggtatagcagcatcagtggcagcaatttcatgacgtccataatgtcggtgtaaatgatcatgtttatggtgtccggcccatacagcagtgatttgacatacaagcataagccaggacaaggctgatatagtcccccgcattttgacagcaggatcttgagatatgccaccaagttttgaaactcttcttggactcagcgaatataaagagtggactgttgaaagataaagaaatcagacggtactgaaatgcaaactacccacggtgcgctttcgcaaaactgttggcgcttctaacccaattcatgtgggaggttacatcgcttgcaatagtcaaaagggtggaaatgagatgtcttggaatttctgcttagcgaattcaacgatccacatattacgacttcataagtcgttctataagggattcacatgcacaaatcccggcataagatccaaatcagaaccgtgccattacgttcgggggttatactaggcaaatatcggcatataatcgaccggtgaaatccgtgcccgaaagcgaggagcgaatttctcaagtaatgaaaaagaatgaatggcccacaaagcataaccggctgcctatttctagtggagggtctacaagaaaataagacggtttagcgaaagagtccagtttcggaaagaccgaaatatattcctacgcttgaccgaataggagactaagactaatcctaagcgaggtcgtcattggccaaagttaaaccagcggccaagaaaaatgggagaaaggagccaagaccctactgaagcaagtggaagacccactcagggatcctgatggtcggattggatatagcgaggacccaatttcaatgactccatagaactaggaacaaatactacactgctattccagtagcaggactagtagaaaagaagcgagtatttagcgtaaatggatagcctacacaagattctcatgtctcagagggcaagcaccccacaaaaagggactgagagatcgggccctggtaaatgtataaagattcatggtttgccaaaattcaatttcgtaaaacgaggttctcaaatcaagatgttgggccgatacttggtgacgctcgtcgctttgacatgtgtcctcttgataccggttatagcacaggactgtaatgcggatatgccttgtgctactggttgttggtaagtccttgcctagtaacgtgggttacatgcttggtattaattcttcttttagctcaaaagatggcttctgcgggacaacccctgagcattgtggtggaggatgtctcgcgaactgtgactataaacttggatgtgatgcaaataacccctgcgaaaaaggatgctggtaagggattccaccctgtcattatgtcggcattccataattctgtcaatctcattgtggttatcatatcatatagcaacaatttcggattttgcggccatgggccagatttctgcggtaaggacgtttgtgtgaacaattgtgaccgcaaatcggaatgtgaccctggcttcggatccgagtgggcggaaagctcgacttgtccattgaatgtttgttgctcggaatttgtaagtcatcacatcgtcgggtgtatatgggttttggcaggcactgacggttattctgaacatgtaggggtactgtggaacaaccaaggaatttgtaagttatactaaaccctgcacttaaccatccgctatttaggttaacagtgttcggtctgcgtatagtgcggaaacaagactgtaaatcacaaaacttgctcaaaagaccgatatctgtctagagtggtgggctactatgaaggatggtccactcggcgcccctgccataggttctggcccgaacagatcccacttggcgtctacagtcacatcaactttgcgtttgccacgatcgacccggaaacatataaggtcctgccagccgataacagggataaagacctttataagcgaattgctgccttgaagacatacgatcctaatgtgaaaatcctcatcgcgttgggtggttggaccttcaacgatcctggtcccacggctacgattttctccgaccttgctgcctctgaaaccaagcagaaaattttcttcgaatctttgatcaatttcttgtctgttcatgactttgacggcgttgatttggactgggagtatcccgaagccgacgatcgcagcggaaaacctgaagattataaaaacttcccgaccttcatggagaatctcaggaaagccctagatggaacaggagggcgaaacaccctttctatcaccttacctgcctcatactggtatcttcaacactttgacttgaaagaattagcgaaacatgtctcgttcttcaacattatgtcctatgacatgcacggcatctgggacgaaggaaacaaatggactgggtcttatctcaatgcccataccaaccttactgagattaaacaaggaatggatcttctgtggcgtaatgacgtgaaccctgatcaggtggtgatgggtcttgcattttacggccgcacgtataccacttcggggggttgtgttgagcctggatgcgagtatttatcgggaggctttgccggagaatgcagccatgaaactggtatccttctcaacaacgagatcatggacattatcaacaagaggaatctcgagtccaaactatacaaggaagctactatcaaggtcgtcacctgggatgaccaatgggtttctatggacgataaagaaaccctgggcatgaaggcagatttcgctcgcgagcaatgtcttagtggtgtgatggtttgggctatcagccatgacacaccaacggcagacttctctcgggatttggcaaaagtgtctaacagacaagtatccatgcaatttgataaaatcgataacgacacggtcattgagagaaccgaccatagccaatgtcgctggacaaattgtgcacagccatgtccagcaggatggtctatgatcaagcgagcggacaaatggaagacatacgagggtgagccaatgatggattccactttttgtttgggcgtcggctacgcctcattttgttgcccacctacatcgccccttccaaagtgtggctggtatggctacaacgatggtaagtgtaaagctggttgtgaggatggaatgctcgagattggctcaaccaatgagggatgccagtttgatgtccctcaacagtaccagtcagcttgctgctctcctacagatgacaatggaaaagaactgagcagtatggcgctatacaacacgtgcgaatggtctgaaccacttgtcctttgcgacgatggtaagtgctcaggcacgaaagataccgtgttggttgaatcgagccgcggcagcggcgttacccattgcagtgcttggaataacggtgaacgtcaccagcacaaacgcaaatactgctgcgatgcctcgagaaagaacaagaagttcgaaaactgtgaatggcatgatggcagtgacctgatccacccagtcacgtccgacatgcgttgctggtctggttgtcccgatggccagatccgtgtagcaatgaacgatgatggcaagtgcctttatggtggtgctcgggcatactgctgcgatggcaccgactacaccgagacagaacatctttcggacgaattgcaacagtttcaagatgagctaagcgattggatcaccaatgcaaaatgtgagctccatctcacgaaaagaagtggcggcctcgaggtccgtgaggatctttgtgagattgttgcgaagcattctctggttgtcaaactagctgcacttttcgctggctacttgaatttgagtggaaggacaagccactacaatcgcctagccaatatctggaactcggtctctaatacattcgaacatctcagtaccagatacatgcttccctggattacgtccaatcttacatatccagagttttatcgacagggctacgaagacactgcaagacgcattttgcaagtgcctgagtggtacgatgagatgattgctgattctaaaggcaccattttctgcacattagatttgtgcgaatacggcgatggcatgtgtgatcaggatgaggatactttggggctggtgcgccggcagactcagtggacagaaaaggttaccaatggatcaccccgtccttttctttaattgactaacgaatcttacgctttccagagagatgtacttgtgctgctgggaaaacgagcaaaggcaaaaaaggaattcattgattgcgaggacgatgataagaccaaaacgagagtccactatactcgatttgcatatcctggagcaagcgagtggcccttgacatccgttcaagctcgagaggccattgtcaatgcaaaaatgggcagttgcacagaaactgaagtgcgcgaacaggaagccactgaagcggacctcaatgcaggggaaaacaatagccctccgaatattaacagtaagtggatgtctgtgaaaataaaagcaaaaggccctatgaactaattttagtggcagcggagcacctcattgaagtaaaactgatggccctatttatgcaatgggctgtcaaaggggacaattgtgctgttgactgcggtttctttgctgatttcttcactcaagaggttatcaacggcgcacctcggacaccaggaagcggtcaagacctcaagcgtcctattgatcgcgtcatggaacagtttggaagcaaatccaataaggaagtattccgactgctccgacagagtatcaatgtgatcaaaggtgatgtaagtatcatctctttccgctgcaaactcaccatggacaagtattaaaacaaatcatgtttagctttggagcttaaatccagttccaggaaatccattaaagtggccggggatggtccaggatgaggatcctcgcaaggcattgactctaatacgcgatgtaggttgcttcacaacacaaaatgaaagctacatgactgactgggatttgctagactattgcggtctacaactaccaaaacatgccgagagtcttagaacggttcaaaatggtcaacgacggcattcgcagtgaattgaaccgcgcagcaaaggcatataaagcacagaagggcaaggacgtcgaccttgcagactgttgggaccggtttttcaaacagagaacgaataaaatgctagagacgggtcgcaggtttgttaacaccgcgattgagcaaatgcgcaataaatggactcacaatccggaggctagcgttatgtggaatgcccaggctcaggaggtccgccatgctctggaaactctggagagccacgtgggagagatttacatggctgatctcgagcttgaagaactcagttagtctgccgataagtatctaaacaatttctatcacaacatgtatatttttgcactaaatatacgaatgatccagtttgaaatacgaagtttgtgatggaccagtcatttgtgatgttacaaatcaaacacaagttacttgactatcctagatgatagatctctgaagctcatgatactgagactccgtgatcgtctcttttctcggctcgctaggatagcaggaacgagagaaaagatcgtaatcggacggacaaaggaaaacgtcttcctcctcgacgagtgaagaatgtccatctgtataaatcactttcccaggacgttccatcccccagtctccccattgttgttctccagtattcagattctcacaagacagagcaaactggaagacagatgtcagacaattcctgagcgatccatcgtagtgctctgaacactcattttccgggtcgtgtggatcaaaatcacagtcaatcacgttaacgtatccgaccatactagacttgtcatctggatctgagctcgccaaaatcgaccgcatagagcggtcatccaagacaaggcagtagtcaaatcgaggtataccgagcccacgatcgaaagcccggctttctacccattgtatgtgtcgtttgcgaatagcatcggtcgaggctccttctaagtttggatcctgaacgataacatttcgataaccctcgtaaacaaggctatggacatcgggctggaattggaactcttctaaatctctgaatgcagccattgcggcgtagcagtaccaattaagcttcgcgatcacggccgcccagtcctgatcagatgtggttgtatagctcgtgcgatagataacatatccccatggccaacctccggtcttcacagactggaaccgaaaaaaccgagggatccaaccattccagccattaggccatcctggttttgtactgaatcgctttcttctctcaagagaggtttcctcgggtggaaactcggatgatcgccacggcgtaacccatgactcgtcgtgaaagatgtccatgttatccgacatgactcttcaggtatcacagaatgaatccagtaggcccgctatctcgcctaatatggttttgtctgttagagattttttttacgagcgttcgctagcccactagcgtcttggcgactgagtcgttcgcggcacttactaaccctctcttggtatacacataatgaataactggctaaagctctaactagatatatcgcgatggcattatataagtttatccccctctagtcgttccaccttctctatctccagctggctatcaatttagacgccaatgcatacaaaatacttaacccacaagctagcacatgagcttcccaccaacggattccagttattgaactgcgccgccgtgatcccgtacttatgctataaaaaaaactacactaaagggagaggggggaaatgggaggtttgaaccaaaaccgtggtctttcgacattcaaaaggaccattccctcctttgtacatcttgaacgccaatgttgaccattttacgatcatatttaaccgagcttgcccattcattcagctaggaatatccatctagccaagacaatggcgagaatttcaaaacaatcaaagaacgccagcgtggagaagaaattactgcaacagaagagaggccggcgcaagttatgcctagagaaaaaggcacgggactatagcaaaatgtgcggggcggaagtctgcttgggcatacgcattcgacaatcagggaaagttttcttatattccgcaggcgcctccgagttctggtcgacactctgctctcaattagtaagttcaggtgagaatgggagatcacaagttttctagctctttcaggactcttactatccaaggccagttgagaggcatgaaaagtgcctctaaacgcaacactttgatggaccattttgagcggttttggcggtcgggcgggctagcagcgcatgtggagatcagaccccgaagatccagcgaggtcagatctcacgccctcaaggataaacaagagcatcaatcacaaggactatggtcaacttttcctgttcaaaagagcatagggcggagaaactcaaatcaacaaaaaattgtttgttttaaaaattcactttttgcatttccacttgtcgctggatcatattcgctcccatagatagcaacccagagggtccacgcacccatagttccctagagcccaaaatgtaattatgtacacatttacaagttaccacaaatcagtctctttccccgtaacgtataaataagaaagcagcccatatttactgcctattgatcaacaaactttcgatcatgcaagtacacatgtgaggacttcccacatgtgtaactcaagttcatccaacacatagatcggtcaacatagtatgtaagatctatgtggaattgctacacatgttccgcctactttacctggaaaaaatcaaggcattcctcagtcaacgttaaacttgtctggtgttcttctgaccctgtcgaatttcgtggtggtcaaaaaagcttatggtgggacctattgatggcgctcatgtaactacaaggttcctctgatgactcacatactgagcaagggcactgaccaatcattggagttctctacgcgcgcgcgattgacggtgatgcgggccaaccctttttcacatgcacgctgacttccaactcaagcaatagcaggactcccgatggacacagcacaattttccaagtgcccaactagctaggtgatcatgggatggcccacagtttcccaatcctttcagtatccctggagcattgccctctctggataagtggttcctgcgacaggccacagtttttcctatatgcggaaaccccgtgccgattgagtcgcttctccgtatcctatcggctgtccgatcgtgactgggcgcaagtacatgatgtggcgtaacgctctaccaagaaacactgtagggttcctagcaaattcttttgcccaagctgttactagaccataaactccgtctagttattttatgagctgacctcagagaggtagagaatcccaagcatgttacatcgacaagtcatactgcttcccgttttcatatagagaccgttcccaaaaatatttctgatgcctcgaccctaccctgctcctcatatcggttctgggtcaatgatattcaatatgcgagcgagaccttaatttccctctggaaagcctgtgaatccaaatgagtagcgttagtccaacatcaagaagatcaaacacaagtgcgcctccaaaaatgactgcatagtacgtccaggccaatgaacccggcaaagagagaacagtcacaacgatggcacaaggaagcatccagcataagtttgagccgagtgcttggtatagataccacctcggccccaagttggtagttgagtccataaaagatgtaggtccagtcaatggcctgtaaaatgtaagccaacgggaaaggaaacatcattctctctgcagaaagataccttccacattctttgggtgacagccgccacgtcgttcgaagcagataaataaagagcgaaagattgtatcccatgcacagatagcgcaatgcacacggtagtttcgaaaaccatgacaattccgcaggataaaagcgctggtcgaataatagctttcggaatgttaatagcttatccagacctcgtaagtttcagacgtaccgaaaacttccgctctagtggccttagggtattctatttgctgtgttgctcgaaaacggccccaattatgcccgacgaaagccaacgttgacgcttcaacagcctgaacagggaccattatgagcccccagcggattgtggtaaaaattccccaggccgtagcatagagatctccaagctgaactattctgttgactagccataaatagatggaattcctgatcgccgactcggcgaatgtgtataaacttggccgaactaatgttttcagtgcatcgaggcttattttcaagtttccgtggccatcggcttctcttttcttgcgcttcacaaccacacaaacaaagtaaagaagtcctaccgtcaccgataatatgtcgcaagttagtcgaataatagcctgtgttacaatggttggcgtatattttccaacacggaacgttgatatcagtaggaaatctaacacgatattgatcaaaaacttgctcgcgttgattatcaaagggatgtccggtttatccagcgctctggttgaggaagagatcgccgcttcggtcgcggatgtcaggccttggatggaggaccagcgtacataggcaagcgaggcatgtcgcacttcagccgggacaaaggcggctgcaagcttggtcgacgttgcaagaaatataacggtcatcagaagcccttgtgctgcacagacaatgatcatggtccaggcaaggttcagccgtgagtgcaggcttcgcgatgatttgtccccaataatcagccacgcagaacgcggaataccatcattcattacctcaacaatgatgccgatgtatgtgtatacatcagttgtgaccacctcgctggagcttaatttggcgacccatagcttgcttagggtgctgtaaacggcgggtggggcgaaggcaagtaggttgaagattgcggaaccagtaaaacttttaaatctgcagtcagcatccatcttcgatttcaagactgacatactcacgtctctcggctccagaacgcgcgtgtcctagatgaaagctcttcccctctgctcctcccttcgttggattgatgagcagcttcatcttggaccgttgtagatgctgcgttggcccccatgttatcttcttcccttttggtgacttacgcaacgcataaaaatgaaaagaggatggagagttcccaggcggtgcgttcccaagtctttgccgaggcgccaaagtgaatgcggggtccaagaacgtacattgctactgcatgagactcctttaactgacctaaatctttcggcctgcattgtaactgtatctcaaggcatgatatgtcacggaaactagaacttgacttggacattgtaagcgcgaggttggcactctacatagcttcttgcgagcctttcatacatgcattttcccgtggagaggcgaaagaaagaggggagcaggcgctaaaatgtggctgtggtccagagtgcaattctacaaggacaacagagccaatcatacttcagcggtacctagaaagtcacgggacccattctggagccacgtgtagtcccgagtagagactagggcccagttcggagattcattgtacatgtacagagacacatgcaaagtggaaactaatattgtggtattccacgttgttgtgtagcaaagaatgaattggcgcgtctggagaggatgcatgatttgttgcttgcaaaggtttcccagatcatgtcccagaaaacaatggctttccccgacccaattcagcttagcgcgatctgagtggggcgctgggagcgctgggaaatagagcgtgagtgtcccgtatttgtgtgagacctcgcagtcgcccatattagatgacggttctcagctagacagccacgttgtcccagtgaggattggttttacttccttaccagcttgctgtaggagcgggtctccgcagtagctttcattgggcgacaatataacagcgctgcggacgctagacggtgactgaaagcagagccagggcctagccgataactataaagagccagaggaatcctcttctgtaaaaagaatatcgaagaaaatctgtgctctctctactatcttactattgaaccgccttgatatctttctatctctgaatactctctacataatgcggtcgcatatcataattaagttgcccgcttctcaggttatatccctccaaatcctcttccccaatcaacagataaggcccgacaatgcagcgaagcagaccaagagatacaatatggtctttgttttcttaacttatcggccggttgggaggctggtgggcgagaagagatgagagcgcaccagactcacgatgcacttgtacataatgggacttctgtcgcctcactcttgcgccccgtctcaaattccatacgatcgaacaagccgcgccgccctcaaggcagcgtggggcgatggagaaacggctgcaggagctagagaagcaggtccaagcttacgatcggcttctccaggtctgggcaatatttcacactttggctgccagcaagagtagcttatgcttcgaaacatgaaatcttgataatgatctcggtgggtggatcaaggagtggcgatgaatacgttccctggatgaaacttaactaataatactttagtgtgtttcgatccaagctcctgaaattgcccgtgggggcgaggagtaagacttgattgtctgcttgacttttctagggccttcgatcaaaccacacgcactctttttgacttctgttctttaggagcacatcgtattcgcttgagagagcctgccattggtcggtgaaccaagctgcacccatggaagccaatgattagggcccgatttagttcagcattccatggaatattcccttgtcgaagatcctggtggaaaagagtttatctccttcaacgaccgttctatcgcaggacggagcgacttctcgggcttgagatggctcaaatctccaccaccccaacccataaggagcatgtggcgtatatctccagcgccatgtagaaagtagacgttggccaggtcaattactcccagaaaaactggaatcgctgatccttgtgcgcgctgaaggatacggtaaatatccgctcctcacgacaccggttgccacttccctacccacactcgttgtaatattaattttagctcgcgctagcatatttatggcttgattgaagtggccggtgagatataaaagcagaatggattagttgtcgttacattgtgatgctgccactacatccaggagtagtcagtcgccaacggatcaggcagctttcactgtcctgacagaaagaattagccaaaacatggcaagggccatcagagatagcttgtagcttacagtatagagggatgaatgtaactagcaagcacgacgcactatactggtctctatagagtacggaagctttttggcccgcaagcgcttcggaaagtatatcaggttctccctcacccaagccttgcaggaaaaataagacgttgccaggctgatcttaccattgcttcgccactacagggtaccagtggatgcatgcccattcgagattgttgttcaagcgagcccgccttgtctgcggagtggcacattaaggagaaatctcagctgtttatatgtggccccgaatagcaactgctgccaagagccagagaatcccctatgctggtgggcctcaatggggagcaggaattattctacatctagcctaggccaccaaagaacatgttgatactgctgcttaacgcggatgtcatgcggatggaaactagcatgcctcaaccactcccagtggcctacgaagcccaaataacgacgcccaccctcaactcaagcctccccgcccacttaacagtgcaatacaagcacggtcccccagccctacgaacaacggccgccctggcaacatgcgcacaccacgcccgcgcgaccacttcggccccgggagcagacgcgttgataataatgatctcctcttccacagactccggcgttacctccgctatctcattcatcgagacgttccggaacctgtaatcatcaagttgtcggcggtggatcttatggccccttgcttgatcggaaagcgagcagggcgggagggtgataaagacgggggtatggtccaaggcgaaggtgatttccttccccgtcccgggctgtctgaaagccagagaagcgctccagagccaggtacccccaggctcgaactggtgggagcgataggcgcggcggagatccagcgagcgtagttcccacgcggcagtgtcccgttgcggagggtgcaagttgaaaatctccggctggtttgtggcgcgccagagtggcgcaaggtccaggtttcccgcaatgacgatgtctcgagttgactctgcagaaggcggggggagcagtgcagaggccgggttgaacgccaccgtcgtgatgaggcagtgtgccgcgggggcctcctcgtccgtctgtgtgtgcaacgttgctgctgggcatgggccgacccagccgttgagcgaggtgacgccaggcaggcagccgaggacgcggccgaggactgagcggctgcgccagtagctgcactcgggcagcgcgacgccgcattcgctattcggcgccattcccacgctttggattgccggcgtgctgaggaccagcatggccatgaggacgtgtgcgaagtgcttgcccgggagcaccacggcgaagagccagtccacctggacagggtaaatgggttcgtgcgacgcaagccagtcctcgcgggccttcttagcgcaaagccggacggcttcaaggtacggccactgcatccgctctgcgaagaggaacagcccctcgagctgctgctcgtccttagccggtcgcggcgcgatcgttcggcccatggggtccaagtctgcgattctccgagcgcgcatgagcgccgctttttctttctcgcctgcggcttgctcgattgccttcaactccgcgccgagcgcgtcttgtgctttgtctaggtcctggaggatcggtagcttctcgtcgaatgcgtgtgcgaggggcacggcttcgcggaaggcctcgcgcgcccggagatagttcttgtagcccaggcatgccctgcccaggaggacataccccgccggacgatccgggtccagtcgctgcagtatcactgcatccctcgctgcatccctgtagttctggaatctgagcagccactcgcccctcgcctggacggtgtcgtagtttgccggattaaccgcgagcgctttgtagaagaagaccgcagcacgctgaaactgcttcgcctcggtagcctcctccgcgagacgaaccagctcccgtgcctcctgccgatcctgttcgggtacgccagccgctttggcatcctgcacttcccgcgcgagcgcgccatgcccgccaacgtggatcctcgtgtttgcaacccaccgctcgctggtaatcaacgacgcaaggatcgcacgcgtgaaacgagcatatatccccttcgtacccccggccccttgcatccccatccccgcccccgaggcaagccgcagcgcgagctccctcgccataaccatgcgcatccggtcggcccacgcgccctcatacgagccctcctggaaacgtgtcatcgtcttggcaataaccgagcggcccgaaatatcctcctgctcgtggtgaaacgcaaacaggaattcgagcacgcgctcgctgtgccccatctcctgcatttcccacgaccccgctataccctcccacgccaccttcccaaccgtctcaaccaacgcggcgatttgctcctcggggtcatcggcaggcacagtcccggatcggatctcctcgatcctgcagagcagcgtcgccgggtcgaaagttaggtcggggacctcgaggaggaggtttgggtgtgcccgctggggcatccggccgtgtgcgagttcggcgttccagaggtcgaggccgaagccctcgactgtaaccgtcccgttggcatgggcgtggtcgtacagtggtgaggcttcggggtcgaagaggatgcagtcttcctcgtttagctcgtttgggctctcggagtggcggcggaggtatttcctctggatccggtagagttctggtcgcggttagctgtcttcaagcctatataatgtgccaggtagcgtagctctatataccaaacgacggatgctccgcctccacgaacccgtgctccgcccccgacatcttcatcaagccggccagctttccatatggcccgtccccttgttccttgccaaaccgatgcacatccaccgcgatgcgcgggcgataagcggtcgcaacctggatggtaaacaccaaactgccctcccgttcgtctttgatgaacatccgcgcggcagcgagaccactgtcaacattcgcggcattggaattggctggcgcattcttccggccttcgtttggcgtcctctctgccgaggctgcggcgtctgtctttccacttgcattgggatccttcccggtccgacctattgacatcctcttgaatcgggctttgatgctgttcatctttcctgtgagatgaggcgtggaaagcctattgcctgaggtgaagtggaggagttactctgcgagattgttgggacgaccgtcctgctttaaggcactgcaacgccgtgcgctaatgcaattggatacgagccgtatgagaactcgctcatcttactgctatatgccgagagggccattcgcggggttctactggccgaaggtctgggcgggacacttggcagtttctgggcgtctaatcccggcgttggtgggatctatgtaagtccgtggtaagcgcagggtataggaactatctggtcgggtatatgtgggtgatagtagttattgacgagcattcatggacagagggggatgctgcagctatggtcttgcttctatgcttgattatatcttttgacatcaatattgacccgactttctagatattattccggctgtatgcgttctcatcgatacctcgcgggacaaatatccagcaacggtttgaatacatgctgcaaactgacttctgaaacgtgaaatcattccaatccggtttcggcgccgaggtagtaaatgtgcattctacttggacaaagcatatacgatgctatagttagcaacattccttttagtctagggagaatagaagttactccattttccgctcgatccatatatcaagcctgttagaggtaggttggatgacattctgaagggttgaagagcaagtgccagaagagtgccagaagagtgccaggaaagtgccaagagctacttacgaatcaaggttcgtgcatagtgtgatgaaccattggccaatttaccccggtctttgcatgatacaaatgctcctaggatagattcacagaaggtagcatttctcagtctatactttgtttgattggctggttaatgctagctgcctaggttttttttttcgtggtaaagataataccaaagctcctgggatgcattttgctctgccgggtactggtttgattggctacaaacgaccaggggttgctgcagctaaggcgcagactcatctgatctccaaacatcccactggttcccagattctatggttctgttggcagaggcagcctccgtgtgtaccataatggcttcaagcctaggtctgtgacagcgtttgcattagctgcatgggcatcggccttgcttgtgattagtcctcgatcttcttaaccacccttcttaaccacccttcttaaccactcttcttaaccactcttcttaaccactcttcttaaccactcttcttaaccactaacacccccaccctctacttgccactagatatctctgaatattatttgcgacgatgctcagtaggttgcttgttgacgcaaacagatgtgctgatctcaagaattcatttattaggtacgttagccagatttcaattttaagaattagagaaagccaaattaacatttcgcaaaatacattgtttacttttatttctcccccagcaggagattggactcatacggtatcaggttgtgcatctggtcctgaaaatttgcccactttacgattacactgacttggtctggaggtccatccagcctcacatagatagtctttgctcctaagccagagtagcgtcattgagtgtcatttagccgaccttcaatctactgaccatcgagggcttctgtacgaaaatctatttcacgattgattggacatgctatttttctgggtttggatcaatgttattagtcgatacagacacgtgatgaataatgattggggattggaaaactgaacaagaagtgatgttatacaacataatgaaggagagaaatatcgggaagtactcaaagatatacgtacacattcagactctttgtgagatttcacgcctaaactcaacaggtaaagacttccacaggggtagaatctaatagaagaaaagatgggaaagaccagtaccaatgcaaccgtgatgcttcagatcacacgcccttctcctgtcaaaaaaatcttttatcatgtatcaggagctatggaggctcgataacgccgaatatcttcatcttcttttctgacccgctccagcttgaagaagttgtaaagcgcaagaagtgctgaacagatgagaagagttactccagtaataacggttgttataatagccattaccgaccaatccccaccttgagatgtacagacattgatgacagtggtcagcagcccggcagcagcatgtaggcataggggtctagtccagaattagagttggatctggcttttcatacctctttcagttaggatttgctcacttacacaaacactttgttgatcagcaaggggtagtttcccctaagctttgggaaatgcatctgccacatgagagccgcaattccactaacaaaaagcaagcacgcaatggcgagtagtggggggttctgaatcatatgtagaacttcacggccggtcctgctggtttgtaacgtcttttcaacctggtttgaggtctgcaatgaagtgaacgtgccgggaatgaccagatagccggccagcagtgcccagttagccgcaccaaccgtgatactgaaacgcatgtccatttgtgcttcttccctaagaattttggcataggtagtttcgttggcgtgatgttcctggtaggctctacacagccccggggtcacatccgcagctgagcaaggcggaacaagcacagggtttattccaggaagtggggacttttccgatcctatcttcactggcatacttatatggttgttcacaacgaaggctatgaccaaggaaatttcagggttaccattggaagacaaatcaacaaagaactttgtcagttctttaaatagtccgtagggaaaaggccgctaccgtacttagtcaaactaggtctagcttctactataggtgaagcctcatttttgccttgcgataagccttgcatggtctggtttccgaagtcagaaacgaatggcttctgataaaaaaaatgcggaagttgttgcatacttgatttaagcggtcgtcatctgcgaatgcactggcggaaggaatcagctgtgggcggcggttgctgatatagcggtaacatcattatattaccttcagtggccattatgtctaggttcaggtatttgtgacaacatgggaatcacgctacgttttcttcggcggccaacatagatctttctcaaacaggcccactgatgagaagccagatccccactgtcaattttgctcgtatatacatagatatcttgaaacatgcaaggtggatagcatcatgtccattgatttgtgggcagaagggattgaacattgaggatcataagctcgctacattccgtgacgctctcgcggcagctgccatacgatgtacaaatttccagcaatatgaaacatgtcgcgagggttcggatctcagagtgtgtgccagtcggatcgtaaaccctatcgaatcattagcccacctggaccaccgccaaggctaccgttatatcttacctggtagtctctcgtttgctctatccgagtcattcgtcaagggacggcataccgaaacggccagctgctcgatcgcatgaatcaaatggcgaatctttgtgcgggagcctttaggtatgaagattggaagagatggtaagcaagatatccgagcttcttcgtgtcggacaaaagccgaaggttgaaatgatcccaaaaatgtacattgacgacaggcctatcattaggatcccgtatgcaattcgtctcttgacaccagaggccacctttcttccttagcattgcgtacgatactagatttgtatggaatccaggtgagtatagagtatagagtatcactcaatgtgatctccttccttcctttcgctgggtgtcttcctactaggcgagctgtacccctgccgagtatctttgtggtgctgtctccagttgaaacttctatatcgtccggggtgaagtcaacaaataagctcctatcattacagatatgcgtactcgatccggtatcgagaatccatcggtcatgtagagagggctcatcactttttgctacagatagcacatgctcgctgatctgtacggcttcatgcttttggtaggtggtggcaaagctaacctggttagcatattcagcctttggctgagcttcagcaaccaccttttccacccattgcttccaggcgaggtcctttgctaacttctttttcgctttctctagcgtacgctcattgagagtgtatccctccggtcgaattgcttcattcatgatatagcaagtagcaaccttatgcttcgggtgagagctgccacagggacagcgtctcttttcaaatgggagcttctcttgcttcacttccggtttcgcttcttggtgtccttgccaggttgaaaatgcaccttttggagcattagttgaggtcacagtttgaacacctatctcacgattcatagcgcggaatgattcgagaagatctcgagtatcgtacagtacaccttcttgtccatgacaatctcctggtatttcccttgccaccagatagggagcgcctctttcacagtgtgtaggaaatccctatttgcatctccatcattgatgccaaggctgacggcttgctctcttagtgagttccactgctgaagccattcctcgatatctcctgtcggcttctgcattgcaaagaccttccacttcatacggatttcttcttcgtacgcagtcgatcgggcaaagcgagacttcagatacacaagcctatcatacggagtacgatatgcaactagagagagacggtggattggatcaaggtatgtgaggatatattcatttacatcgctcagtccctttgtctgcttctcccaccttgtgtacttcactttgtacacatccatacggtctcgccagatccttcgttccttctcatcgccttcctcggggtattggggttccaccggttcttggagaggctcgggccgtttattagagggatcggttgtcgacgaggtgaggtctggattacagagatcccacacattcttttgtacggcatatagctgcacctttgcaaaccaggtgagccactgcggcgagtccttcagtttttcgccctttgtggcggagaggaatgatgctgcctccattactggattcaggggtagctttgcacagcttcagaatagcttcgggggttgcgagacacttctagcagcgggctagatactgtattccaactacagtagtctcattcagtgcgaaccgggctcataactgtcggcgtgggccgtattgtaaaaatgtagggtccaatcaatggtgttcaactctctgtattgctgtatcgacttccctaacaatttatacgggccgtcgattactaatctaaaattacaaaatgcataggatcaatggatcctccggtatgccggtatgccaatgcatctactccgacatattctgtcaaccttaggattcggccccaaaagatttgatctcataatttggctttttgatcgtcagggttccgctcggtattgagaaagtgaaacggccttgtgggcttactagtctcactctctaacaaagccatgcaaactcaatattattcttaaatccgatcatcttccagaactggggatggttggaaacctacaaacatagttatctccactaagggcgggcctactatttttgcacgttacatgcgtgcagctcttagtactatgtaagacatccagtttcaggttgaagctctcattttgacgcagctactgtttcatgcagagaactcggtatcacggtcacacctatagaagagctctaaatttaatataaatagctgacctagaatcttaaacctgtttgtttttcctaggcccctaaagtttttggtcctgcttcctggctctcatttcttgtcattcaccatgcttctcactaaattctcatctcttctattgctggccactcaagctgccgcacatggcctaatcacccgtatcatgggtgcgaacggtgttgagatgccgggactaacaggtaacgggttatcgttgagccctccgtattttcaacattggttaatgattgactctagttgttgatggaacgccacgcgactgcccctctgcggtgtgcggtgggcagaaagataccgcagtgatacgagagcaggaaatgggaagtatcaaggcttcggctttgggccgcactctaatttctggtcctgtagacccaaagagagtaatcatgaatttcatgacacctaataccgacacgcggggtcacacccgccattttcatcaaggtcttccatattctcgcaatattaaatcctactccgggtactaatgtcttttatagcccgccaactgatcaacgacgcggctagtgtcgtcactaatgccggcggagctattctgaatggttagtatgtgaatttcatgacacctaatcccgacacgcgggttcacacccgccattttcatcaaggtcttccatattctcgcaatattaaatcctactccgggtactaatgtcttttatagcccgccaactgatcaacgacgcggctagtgtcgtcactaatgccggcggagctattctgaatggttagtatgagcgttaaattttctttattctgcacaaaaaaaaagaagaaaaaaaaactaagctatctaaaggcgcccaggatgttgcagacaaaacgccttttggtggtgctatcaagggtaaaccctccctccttaaccaccaagatttggtgctcatgacatcaaacaggtgcgcaatcagctgttgatgatgtggcgggtactctaccacggacagaatctggcgcagttacgcccagtggcactgtagagaaaggggtcgagggttatgctggcaaaggttctgtcaatggattgccctctgtttccgacgcgggggtcatcacgatgacttatcatcaggttcgtcacaggccgcggctctactttactcaccccatgcttacttttccgacataaaggtaaaccaagacggtgcaggtcctttgtcggcggacatcgacgcaacgagtggaggtacggacattaaagcgttcaaaccagccaaagttatccaaaacattccaggggtcgcgggattttcaacctccagcaccatggattatgaggtcaaggttcaactgccctcagggatgaagtgcagcggcgttgttggtaacaccaaaaatgtttgcatcatgcgggtcagaaacaatgccatttcaggcccatttgggggttcggctgctttcacaaactgatgtgttggatcatcccagaagctggtagatgcttacagactgagcgctttgcctgtctgtctttgcctgtctgtctttgcctgacagcttggtttgccagtttctcggggtataaataccctgctttttccatagatctaggaatcaagatttctttcttctctctcattccatcttcatagaaatcttccagctaccggatctgtagctgcgtcataatgtaatatggaaatcactacaattttgaacacgttgatagcctactacatggtgcttgaaaccttcttaatcgcacgggctagaaaatatttgcatctagctattgtcatgaacggcctgtgatgtaagtggctcttgtctagtgaagggagatgaaggcaacggcttactatctgactccctgctgtcccctcagatccaaaatgagcttcactttcgcggaaattgtagagcgatttaatcttcctttaaattccgtttctgcaccaactacgatttcctatcggagtgggtcctcgaggaatcgatcaccattccctgtgtgatgccccggaaatcgacgacctttttgcggcgagactattatgaccggcctaaagtcattcccgacggtatgaggaacatggccatggtgggcagttcgtcgttattccttgtgaaatgtctgttagtatggactattgcgtgcgtcgggcagacaatagatcatcccatgggattaggctagagcttcaacgggtttgagcgagcgcattgcaatatatttgccggaaatatgcccctgaagcgccttaaaaagtgacaaccttgaatggggctcttttcttgtcagtgtcgttaaattcgaagtgcgcaggctgcttataggataattcgtccaatttccaaagccgctgtggcaatgctgcaatttactgtactacttaagacgtgatatatgtccctcctcgttatcgtagaagtattaaagtggtaggactctatgcaagagcaaaaagcaacatagaaggaattacatcccccagtggctctcggaaaatttgacaccagtcccctatttagatcattcccggcggagggctgcaaagagttcaagggctcattggcttccggggttgaaattaggatcttcgtcgcctgaggtctgcgtcaccgttaggaggcttgggattctttgcatgtgcgatattttccctcccagactgagcggtggagtaacgagggtctgtgtgaggagtgtcggagctgaataatccggagtctaggatgccgaattcgctgaagttgaaattattgaatccggaatcaagaagattgcttttctggatgtcatccgaaggaccatcgtctgaatcggcaggagagacataatctgaaggaagcaagtctgcccacttgtcgcccacaaagttaatctgctccccgattagataaaggagtttggctggccagatgcaccatcaaagatatcgagtatcatcccagtatggcatttgaagacctgcgaatgaaggccgtcgtggagcagtaaagggaaaatgtgttgcttattcggggataattgttgtcatttttgtgaccgaggaccttgctggcttttttggatatgctgcatgcgctccacggagggatggacaggtgttattggcgacctagtattcttcccttcattgaggcttggagaaatcgagggcagcgacaaccaattatgacaggagtgttgatcaggaggtgatgtcgacgaggagtcgggcttgtggtgggggggggcaactcgaaatcaaaggttggactcttgaaaagacggccggggtcatcatgtggagtgattgcatgattctccttctcatcgtcccgcttgtcgtgaggcactgcgagcgctgcattggggagaacagcttctcacaaataagacaccaatcaacggccccttttgagcgtttggggaaagcgaccttcgcacatgctttggggcgaggcctttgttatctgttctcgagataagtcgcacttccatattcctcgccatattagattagaaggcgcgctgcaggtcctccatcggatgctgctcatgtcgacgatgttcggccgtataagtaagccggcgcgtctcggcgctaatttctcggtgttggttgtctgcctctacgtcgtcgccattgtcatgggtactgctcatactaggagttactcctttggttagaatgaaagacaactcagtgggctccggagatgatgccaaaggcttgttggaggcagcctacctccgagttctgaaagcagggcgggaactgaacgggccagtctttcggttcctcaatggacgtttttctttttctctagtagcttcttgttccacctgtttcctgggcgcatgttcttgaacctatagagccgggccacacggattgcagaagagcatttggacccactcatcgacggtcttcccaggagctttcctatagatcttgaatttttgcatctcatcctgggcgttgtgttccaaggccaaccagaaaagcctgctagagtccacctctttttgtctcttttgtcgggcttatgtttaccagccagcgtaggatgcgtctccaagtcataagaaaaccgtcactgttcggtaaaccaacgcgaccgattgggaaacaagtctgcactggcaaaagccaagcactgctatccacaagggagccaacgtggctcagatgaatatcttctatggaagaaaatcatatgctgctggtgtttggtgtgttttgtgttcaagtttgttgtcaacttcctgacaccattcaccatccgtccatcgccaaaggtgctggaacgagaacactccggctgaaccacggccatctaacaaccccaaaagcgccagagatgcaatcccttcctcacgttcctattcatgaccaaatatgatctggcagccacgttgctcctggagatatgcttcaaaccaattggtggcccgggcttcatgtggatacggtaactaaattgaaacatccgcgattcggtcgttggtatatgtaccgctattgaggcaaaatattggcatctttagtccttctagaagccgtcgttgacaatggtagcccgcaaaactttgactgtggatatatccctcacggtggacctgaccgcttcagccccaaacaattaaaaggttctgattgtccacatgatcgatgccctcgttgctccaataacttcatagtacaacacatcactagcaaggccaagcgatcatggatcgcaaacacagtggacgtacatggcaaactggcatcgctactttagatccccttctcgaggaatccatgggctaacaaatttacttcatgaagacaatgaatcggctgaaaacttccatcgggtcgctggccaattcatccatggaaatagcggccacacaagccaggttttacaaccgcctgttgaccagtccactggctctgtagctacaggggtacttacttccgttggtacctctcttgctagctcaggggcctctacgttgcctccaatcgtcataaaggctgaaagccaagacttggctctctgaatgcgaaaaagagagcagccgaatcctcaaccctcccacgaaagcgacgctgacattcattccacctctcaaatatcgagccgctgtcaacgggtgtatcgaaagagtctcccaatccttatcaaaattagtagcaaaacggttaacgatacaattcaatacccccaacgctatccgaccgtatcctctgtttcccggataccatgcattgtgcatgttatgtagcttagcctaattaaatacctacctgaagagatcaaaatgaacaatattgcaggggcggtcagagtggtctgacgaaggaacgaagtcgctacagtccgctccaggtcactattatttcagaaatatcgtggctacattaaaaaagccgaatgagtcatattatattctagtttcatacatactacaaaattttagattcgagaactcgctgtattggttaacgccaatcaccagcgcagaaaggctttccgggcgctttgaacgacagggctaaagattctatctatccaagatattcccacacactggaatgctacattcctaacgctcgaacgtgcgaagaagctccaacgagagttcaatcactcctgtcagctcgatcaagaggaatggtgctaagtgcttttgatcacaatgtctttttccgttacactaagaccttatcagactcaagatgttactcttcattccgtctgtatcatctataatgagctcttctgctaccttgataatgcagatgagttattaggacacaaggctgttccctgacaaaggagaattctccaggcgcctcgggggacgagaatggagctctcaaaatactgcaaagtttctgacactgaacagtttggtacaatctatgctattgcaacaattatatgtccatcaaaaaatcttcagttcttcgggggcgacaattggaaagtgaaaaatgagaagggaggacaatttccttggtgtcgatctttcgggttataattcagaaggaactcgaccagtgccaaaaacgtattaccccccaaaagaagcccttaaaagcccaagtctcaagaggtcaaggaacaggagcttaatcttatgatggactcgcacgctgcatgcaaggagaagttgaccaaacagaggatgaaattacacggtatatagcaaaggatctgtatacctccctgctttcattgtatgttttttcagctaagtagtctaatagttcttaccaaatgcaaaccaaaagttttatggaagatgcataagcttgagtatccagtgcttgcagcgatgtgcgtgttcaccgtccgacccagacccattactgtgtcgtacggaagaccatttagaactgaccgatcacttcttggtggctcccagtggtagcaagaacggtatgtggacgcagtccaccgatcttccattccccgccagtcaacacatagcacagctcaagataggcactggaatcccattcggctgtcttgccgtcggggaacttcctgacatgccgagctcggacctgccaatttcctatcgcttcggtatcattgacacgtgtgaaggctacactcccgagaaaatgttgggtttgcacttccaagtacattagtaaaaacaaggaatttccacgaggtgataacttacatcttgggtcaccgagccggtcctctcggaacgcgaaattaacaaaatcgtcgggagggcagtgtttaaccaccccaacagctgggtaatcggtatagtcggctattatccgcgatgtagcgatggaaataaaagcatctttatcctgtcatggcatcaattgagaattgtagaggtaaacgtgggatactaatgtaattaccctacctttttgtcccaggccatggcccatttatatgccagttcacgaaattttcgctcatctgcgatggtgtaatccattattgatgggtggtactgtgccctgcgtgacgatgtccaagtccaaaacaaaattgctgcctctatttatgttaaggttagtgcgttttcaaaatccgtaggagtcttctgcagcttacaccgacgccgtaggttgttcatttaagggcccataataggggtcatgcttccaaatgatgtgaatgataatgcacatggcaaacttcacctgccgaaaaacacggctattcggcatccctcgggtttatcggttggatttcggagataagcatagcgtctgctgttcttcctgacttggttagacaattgtagtcggttcagtggcacatttaaggttttagtatccagttttagataatgatagacaacgggttttggtgttggtcagacgccgagatggcacgctaaatgctgcatctgcaactcgagccctgccatgaaacttgatctcgctaccctccggttactcctagctaggttttatagccgagatgccgtaacgaagacctacactgcccagctccgtgttcagttatctgtgcttgagtttctattgttcttgggcgttcactatcagaggagttagtaagcggaagtacggagctttcccattttgccgagcagatttcacggacatggatgctgtatgtgggtccgccacattttttcctaactagactgaaagtctgcatcgcctctttgtagccccattgagctcgcactgggcagcagtccttgccaggccgttgagactatggattaataccttctcgtggtgtccggtgttaatccctgttggggagaccgatgtaatctgccaaggttgtgcggttgcggcccgtcgcggggtaacccgaccgcacaatcactccaaaatcaggggatacggataataaaaaccatccgacttatttttatccgactcacactcgagcccagaagctggtcttgcgttaccagtagaagtggtgtcgccctacaaataaggcaggacaccccggagcttgcgtacggtctggggtcgcatagtgcgagatgcggcgaggcggtagtaaaccgatgacacaggcagtcaagctgactttggacagacctcgctcaaggcccgggggccttgttagaagtcgaactcgttaagacgatgacattctgcacttcacacctcgttaaggctcagccacgggcagccttgggtgcagctgttcttcgagacacaggcacaccgagacacgggcatcctcctgggagatacacgggctatctggaagagggtggtaattggctggaggccaccgacgggcctcgtcaaggctttgccacgggcaaaccgtcgatcctgtttagacatcggggaccaagcttggttagtggagagcaaccgacatacaccgccggatggggtgtaattgagggcttcctgtaagtcacggtcggcctggcggagggaggcttcctcaggtaacgcgaaacaagggtgcgaggtcttgcggggcgtggtatacaatggcagccactgcgacctgggtcgcgatcgttgggaaagatcgtcatcatcacgggacgattgaatcgacgtgcccaggcacatggcgagagtcctgaattatcctgtagatcagggtcgctgccaccagaaagtagcgaatgcacggacccatttctgcctgcgaagaccgctaggtggagcgccgttcggccatgtttgtgcctgacgtccactctaaggcagggctgttctagtagttacgctcttgccagctgattatctcagctgcctcaggaatgctcggcagcaagatatcttcccttttcttgccatgtatcacttctagcatgtcctcggtacaatacaaggtagcaagcagaaagagagtttcgtgcctcatgactgatcatgtccatggatagttccgattattgttctttgtggtcttatgcatccattgcgagttgtcgctgggaggtccggccttctttcccggtgttgtatccgcgactgtgcaaatggaaacaacacgttcgtttatatcaaaaagttgcccagattcgacgcccaaccgaattcgaacatcattgcagaccacattgtatcctgaccacgggtatgatacccaatgcgcaatgcttctttatttctcacgccatcactatagccagtgacacccgattaaagtagtctgaaaaggccgaacacaaccaacaatccgggaaagtcgcgttagaacacgtaatcagatcccaactgcgcttcacagacagtattgattttgacgattaataatagctatgccatgcgaaatgatgttactcagctgttgtgcagtcggtttctcaatcaagttgaggtccatgtcgttctgtatatcagattgatgagtttactgttcccgagaagcaggactctcatctgccgttcacgcaatccatcattgttcaagtttggtaattttcatcgcaaatgtagacattgagacatgactaaatgttgtggctgctgtcttgccttcttggagcggattaagccaacatggtacgccctgtctaaaaagcccaggattataaaatgaagaagatgccgcaagaggttacgtgtacagtgagagtctttatcgaatgccatttctatcctgatctcgacagtctgtccgggttcaagtggacaggtccggatcctctgactaactctactcgggctagtgaggttttcctccacatgtcagcgctccttttccctaaagaggtgcaatggatagaatttcgatttgtgcgatttgagcgggtgtctggtgagactataggagaggatatgttcttcctgccgcgggttgaaacggccatggggaatctctatcggatacgcagacagctactagacacaattacctggcatgctgttggtgtaacaggcactagcttccgactgtccctttagcctggtacggaatccctaccgtattcgagtctctcgacgcattctctgttgactagccttccccctaacgctatccctggacgcacggttttttgtatataatatatcgagtaattacgagtgagattgatctgaattaagcgggcttgtttgtatactcattttagtaaagaccacgataatgaataatgactatttgatgcccttcttgttaaaagcctcgggaatatataacctgctttgtatgtagcgtgattccccttgcaatgcgtcgccgcttgtcgtatttatatatttccaatataggacggggtaacccgaaataggcaattccttactcttctcttacgacgtccgttaaccctgctaaattgggactgtaggggtagttccagttatcgagtaggctaatcagttgttcccgagatgattccagtgcttgttcgaaaaagcgcagtcgagctacctgcttcttgtggtgaagctgaagaccgtccctctcttttctcaggtgtgtaccagcctcctttaagatctcattgctctgctcaatcttttggatatcgatgtgcttggaaacgcatgactcccataggcgtcggtagagtccaacgagtcgggctgctgggaatgcaaacttgggatcgtcacgttcaaggtctgctagtaccttcaagatgggttgaaatggctcggtcgccaaagtatgtcttgttactactttgtgttgcgaatgggagggctacgatggtcagccgaagaattcgaagccgaatggtttcacttaccaatggagggacatgatcagaaggatccacattattgcccttatcattaaggattggcaattcattgggctgctgttctccttgcttttcctggtctgacgagctgtttggggagtctatttagtctacagaagaaagttaaggatctggatagtactgtttccgacaagccttggtatctcttatagactatgtagacgcaggtggctacggactgaattttacgatccccatatcagtcaatcaacgcagtcagtttctgaatagaatttgcttttattttcagcgggcgcttggtagtgtatttgagaggaggaatgtcaacgagttggccgggaaaactgatcaagcctgacgatgttgagggccagatatgaacgcccattggcgtgagagatatctcaactagacgcctcttccactttcgttggaagcctcagaaacccggcaaacagcattgcagaatgggtagttcggatagtaacgaagagcaaaatagaacaaaaaaaaaaaaaaaaaacacaatttatcttcgaagtttggtggttatcacttaaattgagcgttgacaacgtttggccaagctttaatgggttgacgggtcatcctaccgtgacctcgctttctgcagtctaggcagacagacccacagcttaccacagaccaacacaacactaaagcgaggccagaaacaaaggtctatgattcatagtgatggaattataggagcttttcggtgatctaacgttgagtcgccaatatataaggtgactaggacaataaatatgtgaatatgtgcctgttattacggattgaatatctcctacaaagccttaatttaagagggacgtgaaggatttaacagtcagccaatattgcttgaccgacttagcatccctttctctcagtaccactcttactcgtctctcgctgggcatctaaaggtatcaagaatatcgctacaaatagttgcagtaaaagaagacgtgggtttcaataggcctcaattgagaaatatatccttcaatacttctaaccaggtcggtgagtgatagaagtcgaaaagcctatatatacgtcctctacccctataattgctctactatttatttacttgattctgtaaagtaggcttattatatctgatgtactcgataagttcccccctttaatcgagtattggagtttataccgtactgacatttatagtatacattgtagactagtaaaccagacagttcctgtactttaagagatatggttctaagtagattcactgccccatttacgctagccgatcggagatatgagatttggattagctagtcaaggcgtctatgcgaagacgtctctgctatagcaagttaatctactgtcgcggctctggttaaccacagatttgaagtgtaactactcacactataggtatatgggcctatagatccttgaaactacactgacccaaaagacgcgggacagccagatccgtagacgttcgaatataatgtaccagagcaagggccactcttcatccctggtcttgactattagaaaatgtgagttatagaattccacgctggtctactagctaataattaatagtgaacctttgggagctcaaccagagtggacctaataaccctgcactaccgtcagtacaaagccatagcttatatactatttctagccctatcgcttcgaacaatgcagtatatcctaggtggaagatcgcaaaccaagatagcgatttaataatagggtgcggagattcaagtgtaaacttagtcgtatcgaagcttaaggcgtccgtccttcctgatagtaagttatcgcgtcttctgctacgccggtccgattaaatataccaagccttgtgcccaaaatcacaataccactaacaccttcacgctattataggagtacccctcatcgacagtgaaatatactgtggcgagtggcctattccgctagatcgaggataagactaaggtggcgggcgaacagcgtactctatcgcatcgcatcttctgccttcgtccccaccgccttcgcactattaaggagtcctgaacctctggcatcgcaacgcgtttatccgccatggaagtgcaatatttatcgcgggtgggttcgtaacgcgcgtttactgtctcaacaaattgccttaggcaccctagcgcggcttttttgaaatgagtgcagattgcgataagcttaaatgcgacgtggtatggctggtaactgtattgcagagagttgtaagtgatctagttgtaaagccgatataaccattatacaaactgatcgttatatctcaagcgcactttgggattcccataaacaggtacactacgacagctcgtctaagatcaatccttgctaactcgaatcgtacaataggaggacacccttatttctgtcacttgagtcgaatgccacgcgaacaaatattttatctattccagctcccctatacaattacgattatatgctctctatcccttccacatgaatactatcgacgatgagttaccagaaagttcgtatcgcgtacctcggcctctgtctccctattaattctgtgtattaggtcattgttcgagttcgatttatctatatgagataactcctgaattccgaccagcctatacctctacctgaatcatatatatggccaagcatgcaacctttcaaatcttcaagtggcgtaggctgctagtatcaaatgcgtgatcctggttgtcttaggatgacatttagtgtctttctagaactggaaaaaaagcataggaatgctgatgttttgtcttgcttcctggcagatgagtatacctccgcagataatcaggctattagtacaagtccacctacaaggagaaggagacacaaaggcttcccatttttaacctacaatttaacattagttatctcaggtacaaatcgagagggtaagatcggggtataggcaagccaatgagagctcactgcctaagaatcacctcgagtatacaggaagctatattataagggctgtcaaaagtactgtggtgtgcccagtaggttcttatgtacccatttcctatctaagccgaagcactatctgcaaagaccatttaccctaggtgtcactgcagctacaggttagtcaagtcgactgcgcatatcctttatccgtttatatcgtctcctaatatatcacgcacttgtcaggaaatccggattccctatatccctatttcgacggtttttttgagaataaatcatatatccgtcgagcccaccgtgccgcggaggacacacaggtatgttactgttcagccaggcagccactgtaaagactttggtgtccgaaataatatcgaatcagaatgtttataggacctcttggactatcccctagatcctcgagcaaactttccactgtcaatcaacgctcatgtgatggttgcttttggaaggctggccagactgactactacgactacgagcggactagcactcctgcggggatatcacctaacggaaattcgtttcagacggtactgctagaacccaatcgggtttcaattaggtttcaaccgtgttctcttatcagcagaatatggttgattgcattaacttaggacactacttcccaaaaggcaattgccgtcacttcgatccaggattggttgaaatataatccgtcgttaccgaggcatagtaggagccaaccgggtattcttgattgcttgcttgtctaaatctcttagcaacatggttgtctctgcggtaaaattactttgattcttgcgctctctaggatatagtagctgaaatagggtaaggtcgagtgactcaatcgccgccttaagtgatggctttgacttcgcaaggcacaaagcctaccgtatggctaattttactcaagccattcgtttggtaccttatcacatgcttctatacgtgggtcttaggcgtattgcttggtcatagttgaaccagtggatctactatcactatcggattgaggctgtatgccaacttcaccgagtgatcagaatgggactagaattttcgcttacgaaacagaatctatagtgattgatacatttatctatgtgggtgagatgatatgaaaatctccgtactacgtctgtgagacattgatagacctcgccgcgggccatgaggcccatggattcgcactgaactacttccccctgcctatgggcgggcgggcggttgaccgtagtcccgtgttatttaatgggcccatgtctcgcttactaataagcacttcagtcatatgaaattttataattttataatgtttagccacgtacgcatatgtcctatagtactatgtattcaggttatttgagtagaaagtatataatgggtgtgttcagctataactaaacctagtaaaatcaatggactatcgagtctaagtgaaattgaaagtgtggtccgaaatgcaaagaaattgtgatgcgtctgcattgcgtgtaaatatatatattactacaaaatatgctgaacctataaaaccactcacaatataatgcctaccagttgcatcagtaaatttattataaatacgacatattagttatactacatactaggattcacctttattatgatcaattatctgctatactagtggttattaggggtaggtgacaagtgatagatttccaagagttgaacccccctattcaggaaacttatataatctgagggtggcatggaccgatggcaaggcctagacattgaccacctttttcaccgcccgatcaacacacatcaacacttaccaacactcacatcaacactcacattaacactcacatcaacactcacatcaatactcatatcaacactcacatcaacacttatatcaacactcacatcaacactcacatcaacactcacatcaacactcacatcaacactcannnnnnnnnnnnnnnnnnnnnnnnnnnnnnnnnnnnnnnnnnnnnnnnnnnnnnnnnnnnnnnnnnnnnnnnnnnnnnnnnnnnnnnnnnnnnnnnnnnnnnnnnnnnnnnnnnnnnnnnnnnnnnnnnnnnnnnnnnnnnnnnnnnnnnnnnnnnnnnnnnnnnnnnnnnnnnnnnnnnnnnnnnnnnnnnnnnnnnnnnnnnnnnnnnnnnnnnnnnnnnnnnnnnnnnnnnnnnnnnnnnnnnnnnnnnnnnnnnnnnnnnnnnnnnnnnnnnnnnnnnnnnnnnnnnnnnnnnnnnnnnnnnnnnnnnnnnnnnnnnnnnnnnnnnnnnnnnnnnnnnnnnnnnnnnnnnnnnnnnnnnnnnnnnnnnnnnnnnnnnnnnnnnnnnnnnnnnnnnnnnnnnnnnnnnnnnnnnnnnnnnnnnnnnnnnnnnnnnnnnnnnnnnnnnnnnnnnnnnnnnnnnnnnnnnnnnnnnnnnnnnnnnnnnnnnnnnnnnnnnnnnnnnnnnnnnnnnnnnnnnnnnnnnnnnnnnnnnnnnnnnnnnnnnnnnnnnnnnnnnnnnnnnnnnnnnnnnnnnnnnnnnnnnnnnnnnnnnnnnnnnnnnnnnnnnnnnnnnnnnnnnnnnnnnnnnnnnnnnnnnnnnnnnnnnnnnnnnnnnnnnnnnnnnnnnnnnnnnnnnnnnnnnnnnnnnnnnnnnnnnnnnnnnnnnnnnnnnnnnnnaagagtaaaatagaaaaaaaaaaaaaaaaaaaaaaacacaatttatcttcgaagtttggtggtcatcactcaaattgagcgttgacaacgtttggccaagcttcaacgggttgacgggtcatcctaccgtcacctcgctttctgcgctcaatcaccacacacatcaacactcaccatcaacactcacatcaacactcacatcaacgctaacggttcaacgcaacaagcgttcctagacaacactcatctctgtttgcctacatctgaatgaaagatgccaatttctattgtagcgaggaagttattggatcacaagctaccaagggaaaaaaatgtgaaatacgtcatttgatactgaagacgcttcaatttgttagtttatgattttggctgttgaatcgacgaagatctaactagggctccttctatgtatccaatgatgacccttcggaacaatgaacagacgatgaagatgttgcgcaggtctttgcttcttcgggtactcttgaatactctaatactggtccctagcaccacgaagaggtgcctgcacgggctagagggactttttgtcgcagatgtccctgcggagactcttggtttcgcagatgcccctgcgaggcgctttgttgacgcagggcctaggctgcggagaacttggtaatgcagcggtctcctgcagagaacttgttaacgcagcggtctcctgcgggtctcacttgtcatcacagcgtccccctgcggagttcacttggtaacgcagcgcccccctgcgaggattgttgttcacgcagacctatcctgcgaagcacctttttacactcgcggggctcgtggcagcgagggagcgcaagtcttacatcactgggcttgtggcagcgacagccgtggtcacggagactctcaagcccgcaggcaagagagggatactatgacataccggagtgtgaggaccgaagtcctgaatttttttgggctgggaatcgggctccttttatatttttcggctacgtctctaccaaggaaccagttgcgcagttggtagtgagagtcacggtctcgttaataagcgttgaagtaatttcaacgacgttgaaggggtgtttggagactttgtggcctatagactcaagtctcgacctggcctacttcctcttaaaattgtgcgttgagtatggtgaaccactttcatcaactgttgaaaagaaagcaacgccgcaaacgtatggttcgtacatatcatcgaatttgcaattaaatcgcttaacgcgcttacattctacatgtccccattttaaccacggttaccatttcttaatgagggttgaagtgcttcgacagatgccgaaataatgggctgtagactttgtggtcgacggaaacgctgagctgtacctggggttggccggatgacattttggtctcactagagtcaacccttcatctctaggctcgcgccgctgacttttatttctactcgcagctgacttatgttgtctttactaaatatctactccctgggcgcgtaggccttggcatacttgcaatctcaggatgaagattgtctttctttggcatgatagccaaaaagggcccagacctttgaaaagcttagacaagaaactgggtctagttcccaggataaccatgtgaactgatgcaaccaaggcccacgagctaggttctcgtgatcgccactccctcgcaagattgcaacgctactattatactgatgagaccctggagacgaaaagcacccgaccggccaatcaaacaccacgtgtgaattcagatagacgcaggtagggttctgcgatgcagatctcagcgacgacccaggggacagtagatcagggaggctctatttgtggagagaaaatggaaataattgcaaaggtccagacacgatccataagcctaaagttggctgctgtcagggtccgatggaacggggggttgttgcctaggcggtactgctggggcaggtgagtatttggaataacacgcagactttggcgatacaatgataggctacaacccgatccgtggttgtattcttggtcgcagtcatgagaaggtaagttcccctgtcaagtggtaagctgaactttgccgatctggtctgtagaacgttctagaagctacgtatcttctcctgcaataagcctttctccgatgattattgctctctttggaccgtaacaacacttcctctccatctctttaaatctaccgctatttcaataactctagcacacggcttgtaaagaactatgccaattatggacaaaccacatgagcttaaataaaatgcctccgttttactaaaaccgattggtcccggataatatttcgatgtgggccggccctcctgcggccctaaaccttatttcaatcgatctgcatatcttgatcaagatgctgaatttaaagaaactttctaataaaatgttggccttgccgcagtaaatttatcctatatactgcctggcggagattgtagtgtttctattctagttctcatttttgggctgtaaggtttagtcacgaatagaccagaaagtgggtagaaacctaggcttgaattcttcattaaaaccgcattctctcaccgagcgagcatttctatggtttattacaataaactctcgaaatgatttgcagttctgctactgatcggcagtcccgctcgtggttccgcagtctgtgtcaaacttaatttccttgtgactcgggcgtgggttgaaagcagatcggacgcttcgctccacagatcacactgttttcgaccaccgattcaatcaaaccctgccaggtatattttactgggctaacaagatttcagtgccagagccccttcctaccctgtcctatctctctatgggaacgcgcatagtaccgtaaatccttatacactgtccgcagtattttgtaggccacatgggccatgcccctggtttagaatgacaaggacgtgtagctgggcctgctcagaggtactacgaccatgctcgaatgttcacctttgactttggaactttcttactactgttgtaattccaaataagggtgattgctccttcctatacgaaatccatggagtgattcatatctcttatgctagtgtttattgtcgagtaagcatagcctttatggtaataatatatacctggactattttattgaaatagttggctactgttccttcgatatagcaatgtcgcgctccgtcgatgatatgctgctagtgtggacgttctgttcgccggtatctcagtttcctggcggcacagacacgatatatatagtcctatatctaggacgacgattgtgttctttgaggcgagtacggaagcggtgctggcgtcacgtagcctgtggcaaaaggtcagcctcttatataggaagaataaaagtattttatacgtattttcgagcgtgatgtttgagctggtttatcgctgtcgccagactggctagggtcggctgttagaattgtttgaaaccgtttgttaatgttcctttaggtagaggtattttctggtagagttgactgtgaaccgctatcgactagcgagtgccgcacgtcgcctgggcgcttttgtctgcctgaatgtccgggaactttggcgctagtgcgatgctgcttccgtagaatatggtactttttcccttgtaaagactcaacgcttcgatatacctgatattcttcataatatgtatcggagagggctttctacgataggccccgatgggaatccagctaagagagaaggtttttctcttcccgttctggccagctgtatgcgctacgtagggatatggtgatgcttgggcaagtcataaaagtgggaagaacggttgaataaagcagtagaaagtgaattcgaagaggaagggttattgagtttaaaagatcatagtattgtatataaatatggcgattgcgtttatgagccatggctcagcttggtgaactggtaccagactcttacgactcgccccagctaaagcttctgaaggccaaaagcctttaacttttgatgtactgtgtttcgttaagaatcaataacgttgaatggctaccgtgtacctgttaacaatataatatggttctaccagtttgttgaaatatatccgactcttagtgagccatgtagaaatagaatagatatctacgtgtagaatcagaatgtatgggtgaaaaatgtgtgcgcttgcaattcctgttatagtgagtaagcataacacttaattctagtcctgcgatataacttgctataaagccggagtgctttcttctatcacacttaaccagaagtaggaatacttatcacctcagtgtaactcagacgcagatataggcggaattcgaaaagcctcgcgccctcttcgcaattcctgttatagtaagtaagcataacacttaattctagtcctgcgatataacttgctataaagccggagtgctttcttctatcacacttaactagaagtgggaacactcgttaccttagcgtaactcagacgcagatataggcggaattcgaaaagcctcgcgccctcttcgacgaccagactttcggagcagattataacgtgcattgtctttatcgtccttagagtctaaggataccggtagtgtgtccagtaccgctataggggatataataagtgacgagttaccttcttaggaggaatacgactccggcgactaggaaaatagtgacgcagctgatgagagtgagtaagaagctatacgatagtagagaactgtgtttggatatgaaacggacttaggaatatgtgggcaaactcagctatccggagacagtaatacagttgctcttgaacgcctaacagagtaagtataatcctatacggatataattaagaattggcctactaataatatctagactagataaccgaatagggtgagctgctgtcgatactgagtgagagtgtaaagtactaaccatctctgtaggtctattgagcgcttattgtatgactaagccacctggaataaaactattcgtaacaatctggtcgatatcttaggccgattggcaattgttgagactgaggtacagaagttaaatagataaggtacaaacaaatctacagagggctagaagaccaggcgatccctgcgtcggtagcagtgatatgacctaaactatgttttaatatccgactagatattctagagtaaggcataaatctatattggtcttaagttatggatacgattcttttactaactgaaaatattactgaatatagacacttttattatggacgctgagttggagggttattagaaaaggtctgattgacctaatacgagctggtactagacgagctatatatagtttatcgttgtatttaggtcttcgaattttattaatacttgcctagattgtgtatactaaagctatcttacccgagccgagtggctatagtcgcgatctactatatgtaaacgagtactttaagccttttattagttctactattgcagatgatttgtactatctagtctagtatgattgtatacggtttgtataactgaagatataccctaaaggctaaagctacagtagtatataagaattatacgctatgtaaagatgattgtatattggttacgactattaaggtacaatccttcgtgattgatactagtagagtagttcaatgtgcctagtagttgagtaattgctatttgtgattgagttagatcaggatatactacagtaagctttagattgaggaatgagaagagataacaactgtagtatgtaagagaagcggggatttctctattagacctatagctataaggcctagtattgtcctgattagactattaagatgcattccctttatatggactataataaatatcaactctacagactagcatgccaaggtctttcctatttctgaagggtatctaagcggtgtgatactgaatctaccaggactgcgtctctataagtatcagtcacacctacttattacatttcttaatatataaaaaacaaccaaggagtagagagtggtgaacccgctgttaacctgcgccgaataatgtatcgagacgcctgtgcttacttgtactggtggttcttggactaaggcgcctagcgatattcttcggagtaagaaattggcaatatatatgattcgtaatcactacccttagaatggtttagtgataatgttgcaggaagcctgttcatgagctatctgcacgttaactctatttaaaaaggcaattctatccacaggaaattaaggcctagtaagtccaacgtagatattcgtttaaacgagagatctgaattggttgtgcacagacggttcctgctgactaggaagtgggacattcaattcagagatgctgaggtaggtatcgtggccctgagtagccgggccgctttgctcggccgggtccgtgtgagtcaccccagagcctggcaaataggatgccagttatctgttctagagggtatcgattgtgttctaaaatcgagtggttatcgataccatatccccgtgtgcctaatctagaaccagctgaatatcattctacagtacctgatcctgcagagcggcatttgtggactctagctgctgctgcaacttacagatcttgtgcccgacccgctgactgtcagctaatgctgtatctcttactgctatagccagctgcaatttcgaagtttcttcggttttctcggctttaagttgttctagtaactggtaatgtttgtgtctctcctcttctctctcctcctgtgctttttggatctcttccttaacgatgctcattatatgaagacatttcctataggacactttattatatttccgcctagggtttcgtgtttttgtgatagaggatgcctaccatagttagttaggagtacgttaaggtagttaccagggcaataggggcaatgttggccaaggaaaatccagaaaatattgtggaaggtagagattggtactgtatgcttgtgtaacccagtcgccggtttgagagggttctgattgtgtttcgatctagaccaagtagaccgaaggggataacaggaaggcgcagtatgcagctgtactttactacagtggtctgcctgttcccagaaagccttgtgattctttgccatgttaggtgtgctcaatcgtgagattaataacgactcgaagagatatagaaagcttgaaagaaatataagtagtgagttttgagaagcttaattatataggagtatgcggaggcctaagcgcaggacttgaacctgaatgaagccgctcttgctcctgcctaggaggtatgctaaataagggttataatcctaagaaaaatgagtactgggcgttaatacgaatgtataaaacacctaccgctcgattatggagggtatgagcaacaggtccgtacaaatatatatgttggtgtatacaaccctattttatgatagtaaggactaatcggccacatcctgcctaaagtttagtatttagacaacaatgttatctttcaaatgctttgtgaaatttgccgactcccacgactctatattggtcggccctaaaaaatagcggccttgtttttccgaattaagagttctcactttcctgtccgcatatatctggattccccaataagccgttacttgagttatgggggaaaggcatttcttgcggctaagactcagtagtaagggtatctatctagtgtccactatattatagatatgcttgggggcataggaacctctagtgctacgaatcaagcggcagttatagcaggtacccgagtatgttataattgtcaatttaagctacggcatgggcctcagccttcaccagttgaggttctactatcaagtacctaacttgagactcctacagctcacttccctggtaggctatgatcacagtctatatatactatatatcacgataccggcgattatttgagtttaaatgaatttggtaccgaattgtaaggcgtattattggagtgtaatattaacgctatctttaatatatgataactagggtactcagtaggctgttagcgcatataggatctctgttatgtgctccggttaatctaagacctcgcttactaccttatggatgccattgactgacgattagaaatcgcgggtgctaagttcgatcctaattccctctgtttgcaatgagtttaatatccgccttactctagtaattcctgctttcgcctctgttaacttattatgcagtttcttattgtgcgaccgaagaatttgtatatcgtggcggagtttattggcctcagtccggaccgtgtgactttcgttaagacagttattcaatcgggcataagtgcgttctaactcgatttctatgctgttattagcagccttaagcttagaaatctctgctgtgaaagaaccatccattccgtcaccaaaactctccgcctctaggctctgttagcaatgctgtattaataaggatgtctagtaatgcttacctcccttggaatacagcttgtatttgactgtgagtgtcctaacgcgtgcggggaaacagcctcgattgaatggccgatcttattgcaaattttccggtaaagataaatcttaccgctacttaagctagatttaagcacactagcatttgcgctcgtgatggactaagcgtatccatctttaggtcgcggttggagacagactttttcaggagcaactacgatgccaagtcggttatctaggagtattagctgagttattatcggtagggggccacgggtatatatattggccgctagggcttctcgatattgctgatttagttttaagcgcttctcgttactacgcttaggtatcgtagggtaccttcagcactcaaagaatattaagggaatggggacgcgggtatttaaaatatgatttagaactgacccttccgctaaaacaccggcttaatgtaggatcgatgattcgttctttcttaggtcgaaagtggtatccgtgggtagggcctaccagtatctattaaaattaggtaaataaagtttcagctgaaaacttggattagttaagatttggttgaaagtcgggtataagttttattgagaccttattaagtaaactgggctactgaagaaaatataggaaaaagtaacctcaatttctgttcaaatatatcctcaatcactaagttttggtcggcaaacgctagaattaatttagttggggcgtcttcacgctaccaaagatttctgccttccaaggtaccggcggaaccgatagtgacttaacggagggtcgaaagctgatgcgactgagcagactatcgggttcgctaataatattcccaaagacccagcgaatattagaatatatatattgagtaaggttgggtcgactctatatactttgcgctacctatctgttaaaattgcaatgactccaacagctcgccggccccactgccaaagactagcgagcgaccactatctgacgccattactgtgtgactccttaaagcttctgccatcaaagatgatcactcgccatgccggtcgtaacattcgaactgactcatcgagcctaccttcgcagcgagccaagaaggtccttaaaatgaggattcatcatcgatttcatggctcgcacgttacgttccgaaaaccaggcagaccctaaaggaagggtgccaaagaaagcccgcgccggaagggagcgatttcggagcgagaggctattcgattggattggatagggcgacttcgtcccaagccccatagacgttgttaggtcggacaaggatagggcaaacataaagccccaggggttggcatgccgcatttactaattttgttcatatatcgttgaatagatgaaattgacttgcaagacaatgagtatgataatgcagtgcgtgatgaggtagcccgtaaacatggactctatgtaggggattgctcagctaggcctcctatcgattgatataggcaaaatcgccagtatacccatgctttcataattgctgtgtattaccaagttgttctgagaagagatcatgctactctacatgcactgaagcaaggagaacgcagtttacggtgtagatagagtccatggggcgtcatgttctatttttctatacctaatttagacttgaaaacgatccgttgcgtgattcttgtgaacattttatcttttagagacagcacgattactgtaacaaactcctggtttcaatggtcttgtctgagccacccgtccacataccacaagctagttggagataaccaaggatccacctatttggctcacgggattgactgcaaggatgatgcccagatggcgatgatgaccagttcgacctgttgagtgtcagcattattggtataacggtataacgtgggaatctgcaattacctccaatgcaatcatccacgatctctctaacataccaatgacggcaatcacaagcaaaagaagtgccattgcagagagataacacgagatacactgcagcttagctcgaccggcagttgactgttgaaacaactaccaataccatgtaactacacaaaggtagtccgcgaagagaatatagaggctacccagataagtagattttaaaaggaaggttccaacgagggagactgctattttcgctaaagttaaagccacagagaaagaagggcatataaaacgtagtaattgaggcgtgagcgggttttcgcgctactggaagattatgcggatgtactgcagcattgttagttagaactaaaacactgtatatgaccgagttcggtatgctgtgagcttaccgcttatagtggtgggaatattggggtaatccaaaagagtacttgactctatgctggaaacctgttgctctagaacaacctagcaagaatagtaaaggaactacaagataaggcacacagcgctaaatcgactttatactaccgccagtgtggttggatgtaatacaaaagaaatagtctcctaaagttaagaagtagaagaatagttactaagacggatctaatgatattttgtgaaaccataactatactggactgccagctaatgttcttgtttgaacgaggccttgagatttatataccgaaatagagatatattggccaggtaatagtagataaattcctaggatgtctttatttgactctaggattttcttatactgagtttcctgcctataaaaaagcagatgcccttaatcttatgatacagaaggttaactgaggattcttagttgcggcttcggggcaatacttttgctctttttctatgtagacccgagaatagacatcacatttaaagcttgtagtatagtttctgatttagcttgtattatgtaagactatatttataagggccaatcacagttgtagtatcctgcttttatatagatatcgaggatatgcagaggtggtgtatatatttataaatacctaacttaatttctggagagtactgccattctcttaggacttagtcttcggatctatagaaaaagtaaagtgtatactcgctataatatacctggaagtcatataatgttttgataaaatagcatttacctttaaaatggctggaattagctatagagtatatagtgtcttgaatgagtacatcctaagggcagtttttatgtaccgcggattctctgtgttagtttcagcagcctatggttgtctgccttggacggacttattagcttatcgtgattacttgttcggccgaaactgtaactcgaacctttgcttaaggcttataatttgatgatgttttattattagcaaaaatgatacgtgtctcctttctaaagggtgctgggatcagaaaatgtggagaccggggttacaatatccgttcaccgtcataatagtatcttgctattcgtcggcatactatggaacggagcaaaatggatagctatatcactaaaatattaaagtaagtgagatatgctctatttatgggttttaatcgcttataatttttactggcggtctgaagtgcctatatattgtgttggccgatgagtagttgttctaatgaagttactaaattggtaatgatatatagattgtgtttcccttttcttacttgtgttagaaggttccagacaataggttatataggatatagttaattggttcctgtaatctatagcatgcgatgtgtaaatgaacgtcgatagatgtgatagaaatacttctgctattttaggtaaagtcaatccgctcggaatgtgggactttttaaattgattacgtttctccttgctcctcgaaaaaatatacggaggctttcctaactaagaaataaaagttaatgatataaataagagataataatgaaatcgaaaatagtatctagatcaccgcgatgtagatattttatatggtgaataagtcacgcacttgaatgttaacggcttatctagatagtagaccgagataaaccgaatgatggataataggatatgacgtttcatgtgtgcgagactttgtagtctactattgcctatatttctacatactagtctatatcacgatatataaggaattgctacctgcaataccgctttggaatactctacgaggccgtatgtcaagactaagtacatactatggagactgggctgctagaactggactattccaattctcttaagagggcgtaaagtgtacagagcacaactgtagaggttgagaagcactaatctgccgaatgcagtggccagtggagagggagtgtggagcggcttggcgaatgtgtgaatggatggtactaaggccaataggaccacagtggtaaattgaagagataatcgggcggaaaatgcccctatgtccatgtccttgaggtagccgtccgagaggcttctaaccgcgaccattgtgaaagccgatgtatacccaagttgtagcaatggttgggctggaaagagaaaagcgattgtgggaagagctgcggtctaaaccaggaataaaccactaaactatacagaatcttgctctttcgtcattttctccttttggaatgcactaaggctattctgaaagataatatatagataccatatggcgcttcctctaccaaacgctattactgctagagcgtatgggattgactgttgagatgaggggaaatggaagatcaagaatattagtagataaatgataaagtatgagaatctaagcgtgcctatgatgataccgatggcgtagctgcgcaggttttggtaatcgagagtgtttattgtataaagttagggtaagcaccagccttcttgaggtagcattcctcgggcgagcatttggctttatagacaagagtggagctcagcttttactgtattgactgtgggtgaggtattgtagaaatataagtgttgagataatgatgggggcggcgttgatcactagaatagtgaggaaccattatatctgtaatgaccacccaccttaacggccggagccttagaaatgagcgcgtttatattaagttgctaataactgcttttttgccttatcgatattcaaccagaccgaccgacagatagacctccgtggctatgtaattggtgtctcttattatgcaaatgtaggacctgtgagtcgattgtgattcttcctctcttctatgatagcactatagaagatattgtaccgattgtacgctagatcggttaataataagctcataatgcttattatcgcgattgctattccccctttaagctactctaagagcttatagaacatacgttcaccgaactataaagactttacaaatccggtaccgagcgctcgaccaattctgtctattaacttctccgaaattttcagaatacaatctgtaatctggttgaaagagtatacgaagcctaagcggaatacgagaagttctgctcagtgaatgaatcacacttagtgcgcgttgtcttcgagcctattaggagaatgtatactaacctataagtctcattgcagggtataagatgatggtggaactactagcctagcatcgttgcctaggaagacggatgtgtacgactggtaactctactatggtgatatttttaaaggcgggatttctgtaaattctatagagccgcgtgaaaatcataatgtactttgtgtaccacagtatttctctctaaaagcttatatactatgtaggagcccactaatacaaagctcttatgaattagacacagctatcaagaagttccgattactacagaatgtatactataaaggcgagcaatatttagccccactatctgccactgtccttatatatcatttcccatacttctagccgaatgaccatctataggcttagcaattagatgtaacagcagaaaagatggactaaccatatggttgaaccactaatagaaaagaaatctgctaaccatactgtggtaaacatcttagctctaagggtaacttcaacgctgtaaggctgcagggtattcttgaccttagaagcaaaaaccctatatatcactgtgaccgcaattgtggcagtcgtaattagtatcgaggaaagcttaatttatcagtatgtctcttcaatatttgtccaagtatcacatactgtgtaaaatatggtaagtgatctgctgccttttgaaaagaaaactttgcgataagctaaaactccggataatgtggttaccataaacccagcaatatataaatagactacactctgggaaaaccgtcggtagccggaaactaagcttaggttaatatctggaagtatattgctgagatttatggatgtggaatcaagtacggcggataggtcaaaagtaaaagaggtgctggggtcagaataaactatctccgagctatccttggctttatagtagttccagaggccaactaaatagtattgaggcagatgtgacttaaattcgtgtacctaggcttcgactatgctgctggcagctgacgttgcctcatggattgcttcatttgcactggtatggatgctagatgccatgccttcgacggcatttcttcccttattctcaataagcgcagtattaacattgaatgggtcccgaatttgtaaatcacgcagctttagaaattcttttaggtctacctgccgattgcttagcattgattagtatggaagtttttcgggcgtatcttacttttagaaaatgtagacccttcggcgaggaagatgacgaatatccgataaagataagagatagatagactagaatggcgacggtaaatgataatgctatggttgaaactagcgaatccaatctgctcttggtggaaagctttatggctttagaagggagaagatagaggagtgtctcttgaccgaataatagactttaggatcgagagaataattgagaactatgctgtatcgcaatttagggaagtatatatataagctttccagatatggttaacttaacctgtgtgggcagtgttctgcaaatttaactgaggccgtcgcaattttctgccttattctatgggtagtagtagataaatgtgttaggtaaactactagtgaatggggatctataatacataggtgttgtgagggcaggtagataattgatagtattaactaccggaatatgagggcatgtaattataagtgattaggctggcgagttagatcttcggcctacaattattctcagatagatttaataattaaggtggtataaatactactgtatagagtgaccctcgatatctaagttgtctttcttattattccatatacctcctcacctataaatcacaggtgacttgtactagatcccgttatgttattttctaggcagtcagaagttgaacattgggagcggaaattatatgactatcgagaaagttatttcgagctatctgccagagtgtatatctcttacctcgtcttcgagagtgggtttagaagacggatggatggccggcagaatatctatcgattaatacaaatgatgaagatataaggctgttaacgcttgatgagggacaactacgtgccggtgatagtccctagggcttattggtaagatcgcgtgcggccccgatctggcggtggaatcattcttagcttagatatagagctagactataggttgtgcgtatataaccacgagaaccttataacagctgtaaggaatttccttgaccacgataattagtagtggattgtagatatctatctaatagataatgaggaaggtgcgtttgctcagttttagttcttagagattgttgttgataagtttatagtgttaccagacgaccatagaaatgaagcggagtctattcgtcataaattcatccaattactgaaggagcggtatctaaacgacaatcgcccacctgatggactgatctatgagcggattaaccggtacgaaggctaccttgatatgcctagggatccgcttgctgcgaataactggtgggctgtactggaggcccttgtgggaagtaagaaaggaaagtatttgaagcaattttttaaatatgagaccttatactaaaagctaaattctttgcttattattctgggtctctggggagggatgcggattgggctactttataaactgacagctatgtattgcgacgaggtaaatttactctgaactataaaaccagttctatctcagctaatttgattgtaaatctagccagtagtatgctactgggaattgatcttctctactttttcgagactggttggaggaagggaagagcttttattgctgattgatggagttacagtcgagctgcttcaatctcgcgtccctaaaatctcctataaagatttgcaatccttgtaggttgagttggaggagggccgggttttcccgaacttcttggaagaggctcggtaggatatatgggcgcgtttgaaagagatcgattatccaattctaaccttgaaaatattttttaaagatcggctctatcttgaggtggctcaaagtgtcataaagagactgttcgtctagccgcgaggggataagattactattgaccagggtgtgtatgggaagtatgacactccggttcccgtctcgatggcgctgagataggaatggttaggatccgacctgctcgaattttggcgctttagcttctagtatggatttgaaatgaccgattactaatgccttaaatggccgatagacgctgatcccgaggatatgcttgatcggcgaagctccggatcgtcctttcttcctaagtaggaaatatggtgccatttctttacactggtgagagcgagaggtttctaagtacccgtcacagacgatatgttatttgcaataggggagctaccttcccctagagtgtgcgaatttctagaagacttagccgaagaaatagaagttgctaaaagatgtgggaagccgtactcgaacactgttgaggcagatcgattcgctttgtccgcagagacgctgcggtaaagtcaagcctcggttcgagtgacggcggggtttctccgatagtctgtttttaaggcgttctttgctatctgtggaatagtaatagttaaatggccggtggtgatcctcctgacgataatattgaagttcactagcgcggcgaaaggccgactactgtaaatgttggtcgggctatgatggccatagacggtatggatgtggatcctgggagccttaggccaaaccctcttgttactttagtagcgcggatgtataatgccgcggctactgcttcactagctgatatactgctgccgttcggtgttatgactatcacggttggacgaactatatgaatattagacctactaatccacgacttatttatgaaagacttttcgactggtctatttaacaataactttaatgtctagaccgatgagagggaaaagcgatccatttccctatatatgtgctactcttattatctgtacaatccgttgttggtgctatacgccgaatttagacaaaatgagtatactacctacgctattgtaccctcgtaaatcggcgctgggagtaagagaaggatgcttgatgaagacgagcagatggctagagcggaaatatggttacaggagtaaattgcgttgctttcggatcggtgtaacggcgacgaagacctttgacgggaaaggaggtatcaaatttgggtttcactaaggccttgaagaggctcacggtatagaggaggcctggtatggtagagatggtatgagtgaggtatgtaaaaattcatatcttatgatctattatatctcagagcatgttcctgtaaacggcaacgttttagcttgaagcgagtaagcctatggtatctatcttatatagtgcgaaggaatagataataatgtacttcttgatttattgggatgtattgtggttcgattaattatatttattagatatgcgcttggtgtccggcactgatcgttatttatattttacagctgataattagatgtaagttctatagcctgaggaatctcaatggcttcaactattctctgatttatatactcttcttctatttaacacatagtgttatacttgtagtttactctctggccactattaagggttctataccatatggcgtcgctttaagtttaataagtgaggtgctgcctcttttatctcaatggactatggtacactccgccgacttaaatacctttgttgacctagaggcgcaatgataaagaccaccctcacgatggtccgcctccctaaatatataattagataatataacttgaattcctaattaaagagtggcttacttgataaggcaggtatttaggttgagttccccagaacccttcggcgagggtattgtggtggggctatgtgtctcgctaggtgcgcttggggatgccgagatgcttgtaaagcttgatgtattcgggagctcgcagctagagctcgcagtatgggtagtagacccggtactctcggtactggtgcttgtctgttgttaagtgctttcgcgtcttgtagtctctttattcagtggtggcgattggtatgaataattgccctgctgttgcgagggaaccttattactagctgccctttctgtatgttgccttaccgaagctattaggggaagttgattgtctagggagactgtaatactacgacaatcgatggaaggcctattaatacctgtaaaggttagcagttaggtataatgcgagggtagtatgatacctatatctactgagtgtactttctatctcagcctcgcagttaggtgataaggaaactgattgtgtgtgtctagaagttgaaagtgtggtatttaagcttccttttatagcttggtgctatgtgctgactgtattatatgtgaattgaatgaggggcctaagattaagggcttgaatctgactgaggatagcgatgactgtaagtagagacctgaatatgattaaataactttggtatttaaagacctggctttggcgggtggtgctgcgaagcgcttttatattattaaggctcgatgagtatatttctgaggtattaatttacctaggaggtgtggtaatcctatgaaagtaaaagaaatagagaagaacgatgggtggtgtattattatgttggtattactagtattaaagaaatgccgatgatattgaaaattgatgctagcgggagaattaactcttaattttgggatagcacatttgtgcctgtatggctcaatttaagattccctgtgtgtgaagctataactttagaaatatattatttctaagacctaagagatatatattatcctcgatctccccctctttaatggactttgtctatttctaattaacgtgatgagggccggtatagattctgctagcattttgttgctgcttctcgctgttttagtcgtgagtggctgtatattcgctctgtattatgcgagttttatatactgactttcgataggttgtaaggccctatgatgacccgatctatacagcaatatctacctatctagtgcgatccttagaaagcgtatccgcgactgtgacccgctgacgtattttctagtattattcttcgctaatattcctactgccgaaactactgtatgaaatgattatagaggtcggtccctattattgattgtttgtaagtatctaatgattgtaatagtaaactccggcttgtgtatatttgcacggaattgcttatatggacgctacgacggagaacattgaccacttgagtaaagtcagcgaaaccttgtgtaacgttaatgctggaaattgttattgtctgttatatgctaacctatctggtatattcctttgcaactatgtaagtgctctaaactttaaggtaaatagggctccgtgctgacggcactaagagctacgagtgtatcttaataaactgtggaagccttgtgctactggtgacaaaggtttaagaaatatgttaggtcgataacttttatacgtttggaataatcggtagctcttcttaaaacgcgagtgactcgattgacttttacttggtagttgtaggcgaatctatggggtaacctatagagtagtttagacctcttggccttgccactgagtcggattggtatttgaggtggactaattaaggtgctgccggagtgtagcacggatgtgattcacatttccgtatatatattcttttagaactcttaaattagggagctgtttttcctatgtacgcgcttgaaatgagttttactaatttgttctctttgattgcttctctacctctaattttattgacgctaggcctaatgtagctagtgaatatttattgccctttttcctatttgatatctattgatggggctaggctagatgtaggccgaggtgatctgactaagacttaggaaagaactaaagagaataaaatggggaaggaatttctagtggacctggaaagcttgtgcgttggtagtgccctttctttaaagtatctaaggctatcgctacttaagaagctttttataatgcttggaatagtatacgccgcgttgtattgtaaaattgttgaaaactagtactagccttaactcaattattgtgcttatgcttactgtatgaccgatgagataatactttgatagtacttctgcctaaaatagctaaaaagcataaattaaataatgttacgcgcgtagggaaggaaatcggttagttactagagcggttaaccctggaatattcaccctatctctattaactggccccttactatatttctcgagataatgctgaactaataaagatctaattaaatatatctgccttagggatagctcatttttagttatctcctgcttgtatataactacctttgatgaactgtttcgagatgtcagttcttcgagctctgcttataagaatgataagtgtgtataaagacgcgaaatctgttttgaattttgataaacagcctgactcagtcgttttaatttgggccagcctcgtctctttagagtttcaattttggctaggatttagcttatatctaatagatttactaatagtacctgagattgcttggtagggaatatagtcttataattatccctctttcgctgaagtatctgtttagactacaattgagccaatagatacgataatatagctgtaggatctaggctaagacggtgaatatttggtattattgccattaatattcctaccggccgctctactttattcttaacggcagtgatacgatgagttggggaggtgttcgaaaagagtaaaactaataggatcatataactgatatagtatttattagagatttggtcttgcctatctggcgatacttttgtttctatagctttaccgggattttggctaattaattgatacctagaagttataacctagccggtacagatgctatacgtactacctacttatactgtgggtatattgaagctaaagtctaatatgatgtacggtagctgtcctagacttactgcgcaggactagtaatattaaatagagatcaagtattctataataactggaacggcgctatgagttttctagtatactataatgcgaccgcagtcactattatcaatctttgaggctaggctatttatatcgctctcggtattaataggataaggattatactagtaggaagtagaattagaggtagtagacggtaaagccttattataagaatggctatatccgtaccaggtcgactccgaattagaaggtatagcgtatatatttaaagcacgactatgctgatattgattcactgtgattatttttaccaccttaccaccttaccacctttaccaccttcaccaccttcactatcgctaagtcctgaataggaaccactcttaggtatagattggcttctatctcatatacactgaacctagaattttaatattaaaatgtgtcccagagtctagttagagaaataggtggtcttgaaatggagtatcggcctgatctagtaagattaatcctagataaatattgcgaggtattttattaatgagttattaacttaagtatcatttgaaaaatacgagaatttagctgtcctaggtatgagcttcgctcttttttccagggaatctaccacttattgcgagggaagagtagtcgaacctacagtatgcctatagagataacggaggataaagtagtgtataataaagaccctaattaaagcaacactacctctaaaaacgctgctaagtataagtactgtgccctgctttgaaagccttgccgatagattactactatagagtactatattatgccatttataatctgaggtttttgtggctgatattggtctagaaatcgacgaattagtttaagaggtagccgccgttcctgttaacgtccttaataaggtttagcttctatcgttaggagtcagagataagtgatacctagtcgtcctagtgatacaactagcagcgtcagactactctgtgctagaagctccgtcgcttttagacatcctgctctatccggtttctctgatcttagaagcttcagtatgtatttagctagttgaatgatatagggactctacgaaaggtcccgacgagtccttagagtgcggtatttctaaactagcctatatttgagaggtacaattgaatgtaaacggcgaaaaggtagctcttatggttacgttctgaagtaagtcggtagttttattctttaaattcttaatcggaaagagactatggttattagacccggtactagtatatgatcctcttatggtaccgcttatagaatcttttttggtaattactctattgtacttgggttccgtcataggcttattactagggacgctaactggagaactggagtgtaatagtaaatcacaatataatggtcgatttaaggccgataaagggaattgctttaagactagtataatgtaaagccttgatcccttattatatagtgcctggcttatctgtaaaccaatagtttgagtatacgttggctttagtgaagctaacgtcggctataagttaatcattatcagctatggtgtttaaaggtaatatatcgtctctgaaggttgggaaagtatgagaaaaacctggaaagaggtatatatgatatatacgactgctaagcgatagctatgactttctatggcaagctgctttatagactgattatatattgatcaagtataggaagactagactgtgctaataagataaggtggactgttcaatatattaggtctctagcaatcgccgatataattctaagtttcgaaggctagggattgtggcaatataaaaggtatatagactattataagagttagttatgtctggtgctggccttagaaaatgtcaattctgtatgttaatacctagctgtatatttttattcgctagactataatataagtcgtagtagtaaatatcgtttaaagttcctataaatggtgactatcgttaaagtaatagattggacgattaagctatcgcagttgtccgatataaataagtatatctaccggctaaggtaaactactagttctattatagcaaattagtggacaatagcgcctcccctaagccgtgtcaagtaagagcaactccgtaagcgtcgcaataatctactacaatgccacaatgaattttagcttctgtatgggatgaaaagctggcttattatagaactacctgatggtcagatttttatatactactcctatctagatacccctctgcccttaagggaagatatggtaagacaaagattaatatgagtattcagtgatttggtgctgattagtgaaagaaaacacggcctaagcccactattattcgaacgccttgcaactatatttctgcgacctctgcttagttagttggtagagatatcccggtcttctgtgccccagttcgtcaaacctagaaatgggaagctctggcgaatcatttgaataataatcgttgtatggtctcgtagtaatataaaccgtttcgtgtttagttagttcaccttggtgcacagtaggatccgtggcgcacgtcaagaaataccgatctcaatacggtggttaaagtaatggaacctgttcaatataaaagccggactatgacatttcactatatacaacagggagaatcgagaccaatgtcaccattttatttctttgattgtttcttaaactctaagtctagtcacgctaggcctaatgtagttagtcgaatataatctggtcatcgcccttttcctattcgacagcccgaattggtttaggccagaagtagattggaatgggtctggccaatacttggcgacgacctaaagaggacagtaggaaggctagttaggagcggataagtaaatttcagttggttgtagtacttgtcttgtttcctacggccatattgagagcagatcataattctagtaaacttgagaagtttcagtattgagaggctctattcggtatatgtaaaggcctaacctatctatgggctgtgatcggctggttatggccaccgattgatattgacctcaacttgcgctcttcttattgagtctgccaaccaggggatcgagcgagggataatggctcatcttctacgccacattgtaaccgtcaccctgtgtccagttccccgatgctatctccgcctaacgtgtatccggcgatgtcggtggagtcgaccgtgtttcgcgcttggattaagagaaactgtaacatgacataagtactgtaaacggaacgcttcaaaaggggttataatacttactgattgggtcactagaaaggcgatggcttcgccttacgctgtgagtgggtagcgagccaggtgtctgtgttgcagagaattgttagcgcaagtctttgtgatatcgtaatatatgggcagtgtgtactaccggctctggtgggaatatgattgcctttaatggcctggaagcctggtggattattagcatatctcggactcggacgtcgaaagaaagagtcataccactggaatggtaaccagtaggacgcccagaatgaagaccccgagtgcgattatctgtaatattttttagaaacgctatatgtatcgcgaaggggaatgagggaaagagttcgatgttatatacctgacttttgtaggtagtcttgcaatataaattgtggttttggggatatatataacatgagggagagagttaccgacccctgttgaagtcacaatctaaactcgttggcccgtagcaatttgatgctatcgcctactcagaaatatgaggaatttttgaattcattctacccacttaaacggtaccccaaccttagtcaaccaggttctcacatttagcaatgatatatatttaggggaattcagcagcttatatgttacgtatcgcttcattagtttagattattatttataaaaccactaaagggctaaaatttataaattaatcacctctatggtcccgaaagttttgctatatgagggtatgtttgttaccgaatttgataaccggcgtgcttactaattagctaaccacttcggataggggcgatggaaagtataatctcgctacccggattttcggctcgctactttctattttgcgcttaatactagatcctgcagtttatatagcgataactcgaaacctatgccttctgcttcctttagcgttagcttctatcggagtctctcgcagccggatagacttacctagaggccttaagagttgcacaaattctttcgtctcttagaagtctataaaggaaaagttaaggacgaatgttttcagttgacctggagcacgttgacaggatggcgtcgcgtgattagtagcattcgctacgcagctgtataccgcattccatacgatcggaaaatattccttaagatggttcgcgcggccatcaaattttcgaaatgtatcgctagcttcgaaagctctaaaagactttatcgcatttaaaagttcgtgaagatatcgctttcagggttcgactagctgatagcccagctaaaacacaatgcccgcttataaatttctttgggtgaagcctaccgcgatcatttagcctggcggttggttttgcttctggaagctgttaggagagtgcttcagagcattgaagacggcttcgtctctaaagtgaaatagtttttacacgcggagttcaaaagtacttaggggtcgtccgcgtatcctacctataacgccaagcgtatggcgaactgcaccgtctcgtaaaaagagtagggatataaagaatgaattctgaaattgctcctatactttcaagttccgtgaaaatgcttaagccatagatctaattctgtctaggtgttaggtcactccgtccactttcattccgaacccaccttatccgcttgtctttagttatctgtcttgacaggagttaaagcaacacaaagctctggaagtgttaaagctatcgaagcgaagactgcctaacaggagagaccttccactgctgcttccactcctgttctgtactggtttcctcggctcgcgatttgttaagagctactcttaatgaaacgatagctcgaatcaagcgcgggtccccagaagggctgtttgcccggttgaaatgatactgtaaagccagactttgagttgcgtctattgtggtgctgataagttggtggaagctctcaaaatacttgcaataaaagtcgttcttaagtccctgttgacggtgctgctgtatcctttcggtcttcaattcggccattgacatttcgggttgtgttttggatttcctcagttgtggccgggtggtttccaaggccatggtagatccgctcgctatagagatttggtggtctagtaaatttatcttaggaagagatggcttgatttgtagggtagttggtatggtagtaatagggatagtatctttggctgtgtctgtggatcgactgtagatgcttgaagtgttgtcgcgagagtaaccgggagttcgatgttggaaagggtttatatcggtcatggactgtctacgtctcggctctctgaaaccgatgtatatagggaacgggagttactagcgttttaagaatggaaagtctatttcatggacaacgcagtcaatttgtgctctaagattgtttctaaacggcttccctcacattctcaccaccgttgacgaactgcgcactcttagccgtagaccagtaccagtatagtactaagctagtctgtaggaattttaccaatgttcctaggcgctaagtgtattgctatactaaggggtggtattatagagacgttatatggttctttgatagcgagcgaacttttgtcttcgccctgccacctactcgcgcttttagatttcaactaacgagggcgaccataatacgtatctacgggttataaggtatagatagattatatcctgcagttcgaattcagactcctatctagaataattgtatgattctaattgttgctattattactagagtaaacctagtctccgtgcgtcttgtatttcatcggggtgacccgtcgagacctaattacattttgtattctacttattaaccggcttaaacgttaaactatagttttacccagcttataaccgccgccgtttctaccctaaagcaggctctaggaagtgaactagtcgctttgacctgcgatagtagtaataggatctctgcggcggctattcttgatctcgatgatctgtgcgaccgaactaggcgtaaaccttttgcttattgaggaattcctacgctgatttagggaaaccactaatcctttcgcgaaaggtattattggcaatttcaattgtgaccatttcgttaaggctggtgacccaaaaattaatacgcttcctaaagtatctataaaaccggtaaatgtcgactagatctatgcttcctaaattaagatcctgaccagacttaaatctggcaccagggaactcgataagtacctgctacaagatctcggtaggatttggtcttgaataaagaacagatccccgataatgaaatgaagccttaccctggatgggagttttatccaacttaaagaaaaatattaccaacgcgagaatggtccttataagctcagctggaactgtaaaatctatatccaacattgcttctagcgagtatatattatctaatctagggagcgtcctatcgattacctggtctagtcggaaaatattaggtgttaatagatagggtaggtaattcagagcttctaaaaacccttgctttctatctatagatagagagtatattatggcctagaacagttggggaagaggcccctcctagattcgacctagtatacccgttggacgactggggggagatatggagaagcctgttccgatagagaggagaaggtcgtgtcgtttcgccataggccagataatgctcgactctcgcaaagtaataccgagtagggtgttcgtatagaccctactgtcttacagataaaggcctggcaactcttttagttagaagtagctagaaaatgtcagtatattgaaatgtcttatggtgcttggacttatatgggcgctgcaccactgtatatcgatctgttaaaagctaactgttagtaaggttgactaccactatccaaatcaactggctgcaaatggtcacttacgcgttaagtaaggaagggtcttgtcggttgttatatagagttagaaactcgtaggcggtattggtagaacgtggacttattcctcggtaattggctagtatgtaggctttactattagatatacagcttactataatggcgatccggcaacctgtaggattagcggtagcgatatcgaatatacaacaagataggttaacggctgcttttaaaatcttcgatagaccttcggaattataaaaactatctgtggtcaagttgaacgctaaggtaaactaccggatatagtgaggaattggggtttcagacgaataacaaaaaatgttacgcgctaggtacaggaacgcatcgaaatattgtatgaccgaagattgattgagaaaaatgtcaattgccgttaatacacctagaggaggtttcttagtatattaaccacaataaaagactcggctactcggtatatgtacctatactggttccaatacacaggtctggtaaagatgcgatcagaatgccaatacgactttctaaagcctgtagaaggcccagttggattagaccgcgcactctactaccatctaaagtgagaatcacagggggcttcgttagaggcagttagcgaacggtgatatccgacctctcttcgcagatgggacattgagtaacctcgaaatggtactccctaagacaacttggctttccgaagatcacgatataagtgtcatatattgcatgtttatacgggagtatatgctctaggggtcgactcagacagactaaataagtagtggtagagcgaagcctaccctaccggcgatataagcgatataacgtctcttttcgaatggctgccgatatctttactgtgcttaattgtataaagtagtgtacgaagtaggatgaaacgctagcaatatggtatttgaactcattgtcctaaatacttaggtatcgcttcttataaagtacagcgaataccacggtaggcgagaatcctggacaggttagcttcttaattaggttcaggagagtataagttaagaaatatggttataccatacatttgagggggataggcgtctattaagaaggccgaggctataaggttatcaaagtcctcctttaagtagctaatggatgtttacgtaacctcttgaaggtaattgtctattgatttgttttttatatagtcccttcgggctcttactaaaagattaaatggtactgtatgtaggagccttttgtggctttgtacgctagtgctctagaaagcgcttagatgagacgctgagaagcgtcgataattagaaattcgctcggtctggactatattgagttacttaacgattaatgtttacagtggctggaaaacgacactatctgaaagcccgtgacgtggatgtaggtctagaatcgtgactgtcctagtattgagcttttggagctgagtgtattcctgtgcgaaggcttctattatatgttgactgttggttaagacgatgactacctgtaggggagcgggaataaccttattactaattgtaagctgtcgacgtggtctctgtaataagtttattgcggcttggatgttagggatagaatcgaggaataaatataggatctaggtctatggtaaaatgagttacctcttgacctcttgctgtagccttgtaggggtcaacatcccgtctgtgccccctagtgagaaggtttgatgctttgtcgttgaattctttagctacttggaatcctctaacctttattcgagatatagaccgcttttagtaaataatataggattctgtgtatgggtggtcttggtgctgagatagagatggattaagcctacggggcctttctgtgtaatgttgttataggggaatagagcccgcaaggctttattgcagtttgaatttccgtaaaagtagagtagggatggatattgatattttggattgggtaattcctatactagttgttttaggcggttggtattaactaaatcctaagctttattctctttgacaaggtcaagctaggcagctattagagagattgagagattgagagattaagagattggtaaaagaatgggcctattgggaaccttatatacaggctcttatctaaaagggacaggcagtggcttaatagtggtcgacgcttaggttgaagttggcataatcttgtcttgccttaaaatcccctctgaactaaaaatatgtcaagtaccagaccagtgtattcgtagatgacgctcgcttaaactaattatgcagcaactttcacggtttatcagacggcattcttttttgatatcggaaactagaccacataagtctcaccgtaagataaaaatgtgtcttcccctatactaggacccctagacctagttagagcacgtatcatagtggcctttcatatggactatttaaagagctggtacggttctttgttgatttgcctccttacggtaaccttaaaactttttggttatggccttcggtgtggacaattatataagcacgctagcgaaaacgggattggaaaagactctacttcgcgaaattaaccctgtgcttgttctgtcttactcagctgcggatgtagccccagtgctgtgtagagttaaccagatataccacgccgatgaaacttcctatatcagaatgcttagagaagaagtagaaatggatatacattttagtatcagttggcgcggctaactgggcattgctggccggctatctagttattcccggtacattcacttcgctacagaccttaaactaggttgaaaagacattgtaagccaacgaggccggttatatagttctatatatgatccagaaccccctgttactcgctattgtgtgcttactttttgctagtggaattgcggctcttatgtggctgatgtatttcctaaatcttagggggaactacccctggctaattaacaaagtttttttgtaagtgaacaagtcctaactgaaagaggtatgaaaagccagatctaactctaatcctggactagacccctatgcctatatgctgctactgggctgctgactactgttatcaatgtttgtatatcttaaggtggggattggtcggtgatggctattataataactgctgttactagagtaactcttctgagctgtttagcacttcttgcgctttataagttctataagctagagcgaatcagaaaagaagatgaggatattcgacgttctcgagtatccaccactcttaataggtgatattagagttttcagaccggagaagagcctggttagaagtatcaccgttatatcgagactggtatttcccatcttttcctttttgattctacccctcattctggtactgcggaagcctttttgcttctagagtttagttgtgagctcttataaggggcctaaatgtggatcttggcgcgcgcccgatagtgctctcgtctatccctgtctcacagtatcacttcttgttcagttttccgatttccatccaatattcatcatgtatacctattatctaatgaaattggtcctagcccagaaaaatagcatgttcaattgtaaaagagattttcgtacggaagccctcggtggtcagtagattgaagatcgcctaaatggcgctctaaatcgatagaatggttagactgattgctgataggccgatagatagcatgcttttatttaaattgatacttctcattctgccaaatatacttcatctttccaaataaaagaaattgaacgattaccctgtagatagtaaatatatactgtttgtttatgtacatcgaaagaacctttcctttggtttttgctggcatgttgattgttaaatcctactcttatttcctgcgagtctatctcatcttctagtaaaaatcatcaaattttggaaatggctatctttcccacctgatgttggatgttgttagcaaacaagcttatagacagggtaagtttcgagaaatttaatatctcaagttttggtctatcgatttcccagatcaatatgctgtgattccccgaaatgtcaaagaaactgtttaacatgacagccatagggagctacgtatgcatatgacatacggtgatagaagttgtgctaatagaccgagcccttaagtcatgctgttaattgagggtaataagatttagttcaattagctatgttgagaaaggttggctagtcaaacctgttacgtaaccatttatactattacgtatgatccggataccgttgaagctatttattaagtaacgttgatattttgggtagttggtgatcctagtgccagtatgatttatttaaaggctaaggtataagtgaaatatgagagagtataaatattaggctaaccgcctttatgagcccccctttctactaaaatacctgagtcctatccttagacagataacctaaaacgcgctactcttaggaattagcctgttttgctagtatatacggtaggaagcccctactccgcaaaccctattccctggtaatatctctaatagactgagctagatatagctaggagttaagtatcttccgatagtgggattaaatctaacctaggctaaatgatatgtctactaaagtcctaacgactactgtgatgccggaaacagtgccttatgtataaaaccagtacgtagattaactaatattaccgacattgctatatttataggttaatattttcaagtactgagagttttttatgtgatataattacgagctaccctactgttgacctatgtgtcggagacgaaatggcgtctacttaaagtatgaagataacctaaacgccctcttggaataacgccgccttacccttagctttgataattctaatattcacgctgccaactgggagtatggtagaggctattataacagcttatattcctacccctatacgaatcgggcctactataccggttgaagggtctggaaatgtggtatggttatcgaccactcgatggctgactttatgctatctactcctcctagttgttaaaataattgatgaacgtcgatttatttaatttgcttaatatcctccatggaggagtagaatagggctagcttacgatatctgtctctatctaggaataactttatcccctgttatccttttctgtagtaagactgaggcaaaaaggaaaataaaatgttggatattcaaggggaacagtatctgaacatattggaagtaggcctattaaaatagactgaaaattataggctattttatgatactgagtaactgtacctcaactttctatattttaattgacggtaatagaaatcccaattaatagaggtttactgtaacctactataattgcggtaatttactactatacttaaagatctaatgtcgttatattgttactaatagactgacattgcgaagacgaaggttatgtgttaaaataagatcttagagctataaatggttctttgacccttgtccatccttgctatattttttcacgccgcgaagctaatatagcattataaatcgcgctaagactaaatacagccgaccttctaccgtgtggcttaataagtcggccttctgtaataagcagctgagtctaaacttaacggcgtctctgtatatcctaccccctacaattcagaaaacggctaccgcggtaatcatacctagttcaataaagccacacctaggtcgcctaaacgcaagcattctataagtgaattaaaacctataggatacttttgaacctgatactggattatcctaagatcggtctctgatatttacccgaaataagtcggaaaaagggaagttggtatatatctaataacttgaaaaacagttctctcccgctatatatttcctagagctgatggaacaagtcggctatctaagcttcctaaaattgctcgaatgttactattataatgctttatgtatattgatttaggaactaacggaagtgtcagttagccatattctagcctctagctgctcgattactaccgataaactcgttggaattattaagccggtaagccaataaaatctcttataggtacattcgaaattaacttggaataggtattagaaggaatctaatatctacgtgggctcaggcgagcactcgctaccctaggcccggaaataatcctacttacgcagtctggtgatattaagattagtgaggtatccgcagatattgcgaaaattgataaaaactgacttttaatagtaggcgtcgagaatagctgcgaaattaaagaatcggaaataaatcctgtgacaatgaaattatgcgctctagccgatattatcacgaaattgatgttgaaaaatcgtatatacgagtaggaagcggagatttagaacttaccttactagctggaaagtatctctgtcgaagaaatcttgcaggtaagtttatgctgtcttatcatattctcggctaatatgatagaacgagatgtttacccgagatttatacgaggaagagttgaaattgttagtcagtgtagctaacaagactgcctatcacagtatcaaatcttactatgctcgttactgaaggacaaacttattagcttttgctcggctgttttttgaggcctaccaaatcgagaaggaacccgcgatcctattttctatctgtgctgttcggacaatatattattggtgtataaggaaagctaggtacggtagattggtagatggagcatggttccgacggtggtagtttgcaaacgctctttaagcgaacaaatatagtaggttcaggatagccccgactacacttaatttgcgacctgttattataatcagttcttacttatatgacccatcggtattatcaatttatttgtatatttttgcattcgtttatcgcctacttaactagggtctatgtaacacaaggagtgcgttgcttctgtttggatttgagacataatcatacccgctgggcaaaatactatcattatctcgcagatgtgctccccgctggaactataatactgaaaccaggtttgtaatcaacaaagagaggtgaatattattagactggaattttccacttcacagacgatctggattgagctagatgggtctgaacgctcccgtctatatatctcagcgatgcaggacccattgctcatcaggatctttatacaagtttagctaccctggcagccatacgaacaaggcatcgagttggcattttcagtggtggaattagcctcgccggtgtcggctgtatcggtgatgggaattgggccaaatgtaggatttccggtgcataccggttcgccttcttgcggtcgatatttgctgtcgccattatattcaacaatacttccaggccaagggaagtgaatgtctacattttctctggtaatacagccattcacactgcctcccatcaagatttccgggtccttttacagggcatcccccttcgtaggacttgataactttccattccgaattctttatcggctcgcgatcactagtgaggctcacctggcaggacctactgccataggtggcactgcccagaagcttgatggaattattgctcctagtccgataagtcgcctcttcagtcagaacgataaagtcacctagggatatcttataaggaaagtcactaccatctatagcaagtagcgagttgttaagtgtctttctactagatccgtaggattcgggagaggtcattctcaggtacatataggtcagcgaaaatacaactgcctgtaaaagtagacactatatcatccgaattctttgtcggctcacgatcactggtgaggctcacctggcaggacccaccgccatgggtggcgctgcctagaagcttgatggaattattgctcccagtccgataagtcgcctcttcagtcggaacgataaagttacctggggatatcttgtaaggaaagtcactaccatctgcagcaagtggcgagttgtcaagtgtctttctactagatccgtagggttcgggagaggtcattctcaggtgcgcataggtcggcgaaaatgcaactgcctacaaaagtagacactatgtcacgagtattatagtaaaaggggagatggcctcctgtgatcaaataccggttagttatcatatagctgaaggttatactaggtttcgctgccgcttatatatctccgaagtatatataaatgcaaggacgcttgaactattaaggctgctgcggttatataagtctatcacaaaaccatagtgtagcctagttatactgttcttttagcttaaagtgcgctgtagtaggtagaaatttggctttcaagacaagactaatatgattctaccgattaaccggaataagtggtgagcctataattgtgataaaatgtccttatatctgaatagaaaatagagttccccgtttaagtaagtcgggtcgacttactactccttatacaatctggcacgaatttaacgatagacttaactaaccaacattccctataaagactaatactgctaatattctgtccctatattgaatttcccctattataaaagtacggcgctcgctatggaccactatttatgtcttaagtcactacaaataaactcgaatcctagaattacccgcttaattcctccttgattttatcctcctacttcttgtccgctctcagttagagttagcaaagaatctcaatatggatgttcaacctaaacttaaaactaaaccagccgatgtagcgaatcaaaaagcatgtaggagaagaaagtctctttttaaaaaggcctctgagtatagctcggaatacgatgccgatatctaccttattcttcggatgaagaaatctaggaagatcttcgttctggtcttaaatataaaagattggcctctttcctaatattaattagtaagttctctgtattatcgatctcattgttagaaaggtactaaattgatttctagaagtactattatcctatacctattcaaatgtctctaagcgacctagagtctaagctatgaatctctatcttctatactagtaataagtattaccctcaattaggtacccttatagggttatcctgattgttcagctaagccctttacagcttatatcccttataaagtcattcccccctatcacttatatataggattaacctccgagggcttccgttgtatcctatgaattataatatctgcgctacgccccgaagattggtcagagtcgattaaccttattatttatgtctattataaatgctgcggaaatgtattataaacttagttgattacgttaaaggatataaagatttacttccactaaagggactaacgatgaatttattatccgaaatgtaaattctttaggaattagaggtaaataaaactctattacagtttaagatttgcactcgcctagttagataataattgccttgctttatgctaagccttcccttagcttctatgattattctaagtataaattttaatatagggcctggttacttaattaggtttacctctagtggcctaaaaccgaaaggcatcttggtaaatattgttggataacgaatttgcgtctagatagtacgagacttgtttgatgatatatcccttatatactctattactgatctgtatatgtatttcctattctattctatcctatgagtggcctatcgcgccgaccgacattaacgacattcgcttaataagcgaagaatagcatcctcttaggcatgatatcaatcataccgtctaaaaagtcttagaatcaagcgccttagtaaggatatcgctacctactaaccagtaaggttatatggaattatgcctatctaggataaaggtataagatccctgtactgctattaatgagccgaaataaacgagtagtactcccttatggaatgcttagacattaaactttggcgagaattgcgataggctcaattctagtgtaggcagggtttctgaggagctacccggaagggtgtttaagtggccctctgatagtattaccgaagaataaatgtctctagggggtatcatattcttactcgatgtctcgcctagcgttttatcgtatctatagatgctgcttagttgtaacgaacgtggtatatcggtttgggttgctctagattgcaagcttatatctggtgcgataactggttataaagaggccatgctaaaaatattcttatcgtttgatcgacggctgtcctcgggtctatactagtagatataggggttcgtacttgttagtaaccagagacggttgagtatagagaattctaacttcagcttgacgctgtataccactgtcttaaagcttacttgaatgtagtgtagcttatactccgcgaggagtagtaagacgtttaggattataacgaggatattgatataaaatagatggataatagcgttgcggccgtcgcgaccgcggattataatggtactcttgaaatgatataccgctttatatatatatatataccacagataacgaagtcttatatacaaaaaactgtcgattagatccagtcaaatatcgcggtaggacgagtaaagcatatatcgctgcggttgaggccgaagaaaaaaacggttattggtatatataggatacaagcgtttgtaatgatcatctatagaacccactgtacctttcttatgtcggagaaaatgaggtgtagacgcgagtagaggacgatagcttagccggtaactatggtgtaccatcctattataaaggggatggacgtcgggaggttagacgcctgagaaataaagcgagctatagtaggaatggtatatacgagaattccctaggatgcaaattgtatactctagaaatagaggccctggtagcgcttaaatgagtcgaacgtgataatcgctgtttctagggcattgtacgcgccgatagagaatatagatacgatctagatgatagagatgttctctatgagaatggccccaatatttggtagtaggctggttatgagtgtatctatggtctaataaggcttaacaggtataaagagggctagaagtatagaggataaacgattaacagcttggtttataaaagcctctcaaaccgaaaactgcccttgcaataagatcatgacatcgtagctagggggctccttagaagctctaaaaatgtctagactcttatcggcttagggggaatatgcttggttggattgctagtggtctgaatgggtctaacgggtaagttagctatatcgaaactagagtaatttgtagttgagactgaggtatacaattgatttttaatctatgccacagttatttttgacgtgaaggaaagctttcccactattcctaagttatagggctagtttcacgacgactgcaaaaccgagggcgggatcgtcggcctatggctaatcgccttatcttgaatcttgataaatgatttccgatgaaccatggaaacgctggttcggggagaaaatgggattatctgtggataaataggatttagtttcgatgttatcggaaaccttactaataaactttctgctctacctgctttctaggtcggccgtggttgaagttgtccctacagtcataggagaatctagaagaatcgggtatgcttaccacgggcgtagtcttttgaaatattatgaggtagcactactgtattcaaaatattctcgatctctagagtctgaggacgggtagaatgagccggatgctggaaaaggagtgggaccgcagatggtcggcccacaccgctgactctttgccatttccgtcagccaatcggtttctcggctttttaggcaaaacctaaaaaaatatgcttatgtaatcccagctgatccgttcaaatccgttgaatgtttataagctgtctgctagggttataagaactggcgatcgaatctgagtagatagaaagcgcagatttcagttttaaagggagtatacttattagggaagctagtataggagaagatatataccttcttgaatatccttcaaaggacgagactaacgagaaccaacaggtcggcactcgacgaggactaagttattttcttgtgagagcaggtaggagaacccgaccatggattgctttcagcgtaccattcttttgctgggtacctgcgtgatattccaaatacctcaactgccgtacctgtgagggtggtcccttcagcaggaccaagcaataaaggtatgttgcataattactggcctgtcgagactaggcttgtggatcgtgtctggacttttttgaaaaactttgctatttcttctctcgactataaatagaacctgcttgatctattgtcccgtgggtcatcgacgagttttctatcacaggaccgtaccagcgtcggtccatattcacacgcggtgtttgattggccctacaagtgcttcctttcagctaatgagccttgatagctgaaatgcctcaaatggttgccctggaaactaagcccaggttcctgttatggctttttcgacacgatctaaagtctcatagtcagttatggaaccatggtgagctttgaggaatgtagcacgagtggcaacggttggtgcaacttggatcccaaatcctagttctataaaacaaagccctatacatgtccttagttgatttctggattgttttcttctctgaatgaaatggatgtctttatggcctaactttcggaaactgttgtaatagtgggaccgtgtaaatagtggaagttacatctaggacaatagtacaactacaccacatatggctgaggccagagagcccttcttgtttctaagagcggctcggatggttcggctctggtcgatactgaggcacaaccgtatacctcaacatagatcccggtgcgcggcggtcgatcactttctctacaataaaaccgcagatcttgtgcttttgcgctagcgtaccgtggggcccctgtgtgtcaatgggtacttgactttcaggcttatgatgctgataccgatacagctgcttggcaggggggaggtcacgcgtttaccttgtttcagggcttttgattgtctccccctaaacttttaaagtcgagactccctgaaggccactgcgatcaatcatttcttcgctttgcctagtgtctttctaaacctgcaatcactcaccagacggaaggattcagtatggcaaaggaccaaaagccttcccggcgcggtgtagaccgcggtattgctacaatgaagctcggtactggtaggtcatgtgcctcttcgctatgttctgctcggtcgactgtctctaggtctaaggcggtaggcaagctgtacaaagggctggtaggtcaatctctgtttcccatttcctcgctcgagccttgttgtaaccttgtgctttatcttatcagtaccttaatgagccatcttgctgacgttagcttttagggacattctatagcgaaacgcgcccgaaagaaaaatgatgaagtaacctatcaaaagtgtttagctatgatggacgaggtataagaggagtgccagttagcccttgaagagatagataaagagagagcctatgactcccagtcgatgtagcgtctgtatgctgaaaaggcctaggagatatcgaaactgtaggaggctatcacagtaaaaggtaaagccttagctgagaaccagaggcttgaaagagagctctgtcaattgtagtaggcgaaggagttattgtacgccacaatgtagggcctggtcttatggcacgatattcagcctgtcttgtattaaatatatggcgagctggtatcggcgactactcggttctggaatacgatcgatgccctttagaaccataggttggtatcttacttgcctagctccggagggatccatggaaattggcctgagtaggatgggccgcttggcactctaggtcacaatgccctacctgggttttccgcttcgagtgattatccgcttgtaacttaagaggcgccagttctaatcaactaatattaatcacttgtgtgaaatatggtaaattcagcgtttccggcggtcctggctttactatggaggaaccggctagtcggtttatatagccactacgtaggtagatagctcatgagattatctttagtaataccacagccattctatcataatagtaaaaatgaaaaataaatggttgttgtccgatgttctgctgtggaaagaatattgatgtaaatactttgacgattagactcgctccgccaagcgtagcttagaaggtagagagaatgttctatggtcgctgaatgtggttagcggtagggcctacagcctggggagatgatgcgctgatctgtcggaagcaaccgaatctgactgatcatgaccgtggtccctacccagtatttgataggcaatatgactcggcgacattcatgaagaaatttggctgtttccttggtgcttggttcacatatgcttttcttgccacttggtagataataggattttaaacgatagcctacgacgctggcacgaactatagtatttttctggtccgcccacagtggccgaaactcaattgagtaggctacccgtgggtcatgagatttggaatactctactaagcgtacgacagctaatctatatctcaaattgatctactactgaatgtggacgtgagggtccagtgggctagggagagggtagtcgataaaatgatacctaggcgcttgagaaaccttaatggtatgaatcagtttataactgttactggcgaggccagagaattcgtcctaaggaattcagtttattataccggaattatagtaaatatttgtctactttctgtagccttacggttagttatagcttctagtctgccctagtgagatatgattggtcgcgaagtacaatgcgatggtgataccttagctaataaggctgataacaggctctccgatatattctacaactatattatatttcgatctagatcactgctgcgaccgaagggttcgcctagttgtattatcctctgtagtactgttcttcccctctttagctattatctctatagctgtctctacgactgccaaccgactgcggatgtcctccaagtcactgcgaatagttgtaatccagctgttagagttatccaatgctttttgtatgagcctgggaaaagtcagcctttgttcgttctctgatgtattgtataactaacttcgttcggatatctaggctgattgttgtaagtagatgtattacaaaatattattataggggggtaaattcgcactcactctgcggtacattgtaaggcgattatattgcagtcctccgcgagattagcctatccgggttgttctagttcttcttctggtcgcgggcctatactctaggtgtatggaggactttcctggccatcctctactacgatgtcgttgtggtggttgccaaagaagccattctcctgtaaagaagactcttcctcagtggtattaccttccgctgaccctggcggactctagatattctcggacccggaggatgacagggatagtgcacgttgtaatcggctccgaaagctttgtcgttgattagtgaacggaatctttcgaatccttcctatagttggatctgtgttaaggtaagataatgagttctcctagctagatgttataggagaagttgtataagctgatatgaagagttagttctctaaaccggaacttataatcggggtgtgctaggccactatgttatatccgtacttacagcaaatttcgcttggtttggaatacattcagctaattagtcacgatttttattaaactttaggggaatgaactttgtaggaaggcaagttttgcctctaaagtctgtttgaggttacattattcagtacccggtggggcttggtctgggaactcattgctgtgttcttttgatgtacagtaattgtatttaagaataatttctaggagtatgaaattgacagttaggcgttcttatagctagggattgttttaatacagatggcttgggggagcctgaaatacgaagtcaataattcggaattcagacttactgaaccgattccctagaatgatctatgggttatgttattgagactttagaagaatttttgtgaaccaggggtactatcttaactttttacttggatctggagaggatttatgctcacttttcccctctattaggagcttaagtcgtgctattgtccgaaaaggtcgttctggttactgttagttcatgcgatatgtccccttgaagcgaggtggcctgggtggaatgggaggaaaagaaccttctctcctggctggacgcttatcgggcgctgccgtggaaagcccgctcctatgtatattctgaacaatattagatggaccgaagcgctgagtctctgcgaggaaaaaagtactatattctgcgtaagcaacgtcgtattagtgcagaccgcttgagtatccaggctatctaagccatctaagccgagcaggagcttatcgctcggccggccataaggctttattagcgaatcttataagcagaaggcctgcgcaaagtaatattgaaaaatggtttcaaacaatcctaactactgagactagctagatcgatagtattgaattaataaagaggaaaggttcgagactaggtacgaactaatgtttactaccctttgaccataagctaattatatatcacaggccgcgcgataccattactctgccctttacggtgtgaagaaacacgatcgtcgacgtagatttggaactatgtatattgtgtctgtgtagctaggaagctgagataccgatgagcggaatatccacgctactagcagttcgttggtatctgcgctatatcgcgatctcgaagtagtaatagtaaatatctcgatgaattagtgctgttggatgttgctacgaacggggaaaatggcaaatatggcagctgagcaatcaagctactgtatgattgttgtatgtacgaatacacatattatcaaaatataaataagcaccattccttggaattacgataatagcgagggagtaccaaggttatagtttgataaaagttagttccctagagatcgtagaatatggccgggattgtcgatcgatcgccgaacctggaaaataaagttcgataagccatggaaatgctccctcggtgagaggatgcgggaggatgcggctgtcccgaatgatccttatggaaagcttatctaaacagcctctgctatacttgctttgtagattgctagcctaaaaaaaaagagatccggagcaggaccaacaaattcttatgctgctcatatataggatattaggaaaggaatattttattagaagatactgcattcagcgtcattctcgagatgggtagggtgcttggaatacaggttaggtgccgcaggtgggccggcccacagaacccactcctgggagccactcggttttcgggtttagttcaaaaaccggagatatttacgtaagctcatgtgatccactggcattctttctagttataagccatctgctagagttactagactggcgatagaattgagtatatggagaggaattgtctggctcgaagagagtatagtataatcattaggggaaaacttggtgtaggagaagatacatagcttctagaacgttctacagaccagataggcaaagttctgcttcccacttgataggggtacttactttctaatgactgcgaccaagagaacataaaagaatacaaccacgggtcgggttgtagcctaccattctgtcgctaaagtctgtgtgttcttccaaatacttacctgccccagcagtacttcctaggcaataatcccccgtaccatcggacactgatggccgaaagctttgggcttgtggatcgtgtctggatctctgcaattcgttccagtttctctgcgggcgataaatagaacctccctgaatctactgtcctgtgggtcgtcgctgagatctgcatcgcagaaccctacctgcgtctgtctaaattcacgcgtggtgtttgattggccggtcgggtgcttttcgcctccagggtctcatcagtgtaatagtagcgttgcaatcttgcgaggggtggcgatcacgagaacctagttcgtgggcttggttgcatcagttcacatggttgtcctggaaactagacccagtttcttgtctgagcttttcaaaggtctagaccctttttggctattatgccaaagaaagacaatctttatcctgagtttgaaagtatgccagtgcctatgcgcccagggagtagacattttagtaaaggcaatacaagttaactgcgattagaaaggaaagaaataacattcagcggcgcgagcctagagatggtagtattgattctagtgagaccgaaaggtcctccggccaaccgcaggtacagcacagcgtttccgtggctatctccagcccattatttcggcatctgtcgaagcacttcaatccttatgaaagagacggtgactgtggttaaaacggggagatatagaatgcaagcgcgttgagcgatttaattgcaaattcggtgatgggtacgaatcttactttcgcggtattactttctcctcaacagtcgatgaaagtgggccatcagacctaacgcacaattttgagaggaataccaggtcgagacttggctctgtaggccacaaagtctccaaacacccctttaacgtcgttgaaatcgcttcaacgcttattaacgagaccgtgactctcgctaccaactgcgcgannnnnnnnnnnnnnnnnnnnnnnnnnnnnnnnnnnnnnnnnnnnnnnnnnnnnnnnnnnnnnnnnnnnnnnnnnnnnnnnnnnnnnnnnnnnnnnnnnnnnnnnnnnnnnnnnnnnnnnnnnnnnnnnnnnnnnnnnnnnnnnnnnnnnnnnnnnnnnnnnnnnnnnnnnnnnnnnnnnnnnnnnnnnnnnnnnnnnnnnnnnnnnnnnnnnnnnnnnnnnnnnnnnnnnnnnnnnnnnnnnnnnnnnnnnnnnnnnnnnnnnnnnnnnnnnnnnnnnnnnnnnnnnnnnnnnnnnnnnnnnnnnnnnnnnnnnnnnnnnnnnnnnnnnnnnnnnnnnnnnnnnnnnnnnnnnnnnnnnnnatctgcgacaaaaagtccctctagcccgtgcaggcacctcttcgtggtgctagggaccagtattagagtattcaagagtacccgaagaagcaaagacctgcgcaacatcttcatcgtctgttcattgttccgaagggtcatcattggatacatagaaggagccctagttagatcttcgtcgattcaacagccaaaatcataaactaacaaattgaagcgtcttcagtatcaaatgacgtatttcacatttttttcccttggtagcttgtgatccaataacttcctcgctacaatagaaattggcatctttcattcagatgtaggcaaacagagatgagtgttgtctaggaacgcttgttgcgttgaaccgttagcgttgatgtgagtgttgatgtgagtgttgatggtgagtgttgatgtgtgtggtgattgagcgcagaaagcgaggtgacggtaggatgacccgtcaacccgttgaagcttggccaaacgttgtcaacgctcaatttgagtgatgaccaccaaacttcgaagataaattgtgtttttttttttttttgttctattttgctcttcgttactatccgaactacccattctgcaatgctgtttgccgggtttctgaggcttccaacgaaagtggaagaggcgtctagttgagatatctctcacgccaatgggcgttcatatctggccctcaacatcgtcaggcttgatcagttttcccggccaactcgttgacattcctcctctcaaatacactaccaagcgcccgctgaaaataaaagcaaattctattcagaagctgactgcgttgattgactgatgtggggatcgtaaaactcagtctatagccgcctgcgcctacatattctataagagataccaaggctagttggaaacagtactgtccagatccttgagtttctcctgtggacaaaatggactccccaaacagctcgccagaccaggaaaagcaaggaaaacagcagcccaatgaattgccaatccataatgataaggaccataaactggaatcttcagatcatgtccctccattggtaagtaaaatccgtcagcttcgaattctttggctgaccatcgtagccctccccttcgcaacacgaagaagcaacaagacataccttggcgaccgagccgtttcaacccacgttgaaggtgctagcagacctcgaacgcaacgatcccaagtttgcctttccagctgctcgacttgttggactctaccgacgcctatgggagtcatgcgtttccaagcacatcgatgtccaaaagattgaccagagcaatgggatcttgaaggagggacggaaagctggagactgagcattttttattcctctcttatgaggacaaactaggggaatttataaccacatgctacagtaagttatcgaatgcgttgaatgtatcaacagcgtgcaccgttggcacccgtcaccaacacaacgaaagttcaccggcagtataagccttatctctccttagggaagacagaaatagatagcggaaaaacaagtgtcattattcccccccatagacgctctaccacatggacactttaccaaggctcaggctcatcgacagggtaggcttgaagatcgctcgctttaaaggctgaaacaacatcattacaaagagcctgaaccgctcgcttgcgctccgacaatactgaagcttgtatattgcagagctgtagaaggatatcgctatcgcttgctaacaagtcatttgacgcttgaagctgtcgctgctcctcctcgagtcgtattttctgggccgatttgacgacgtagcattcctataagtaaaagtacaagtcgagcaatttgagggctggtgtagcgagggagtcattgaggcttactacttttatgaactccgctataagggtacctcgtgttctcactggaacctattcagtattagtgggttttttttatttccttcctagagggggattgacctaccttaggtttaatagttgtgccgtttgaagcttattgtggttggttttccaacttgggtttatcttctggagcgtgagatactcggcactgtctcttggctggccgattaatgggggaaggcgaagtgggatggtccattttggtgaattggatcagaaattatgctcgaggggcatttatagctgataattcatgtgaggctactgttatttctactagtgcttccttacctagggtcgactgcaattttaaagctagtgaacagttagcttaaccgctgacgctcgatctcaccacctgctgagagcaaactgcttaggaataagcgggattaaatcgcatctatagtattgacacaaactaatacaaagtctatcttataatggtagtctataagtgtacttccgatgtatggatgctataaattactttcaaatcattgaagctttgctgtgactacaaactattcgaagtgcggaagtaaagataatttgattcccaatcttgatgttaataggcgctgggaacagctatctcgcaccacatcactagagctacctgaaatagatgtcgctagcccttacaaacgattaaatattctcctcggagaccgttttaacaattttttagtcgtgttgttgttataaattctgctctggatggccctctggatgcgatagtcctttactagatctagggatctcctcaaactgaagtgtatcagtctgggattggccacaagtgcatcaataatcgagaaatgtccacccctgaccgctaacatcaatggatcctcgaaccattgattccttaggttgatatcaattcggctatggcgtagtatttcccggactatctctaggtcaccgccacgggcagtaatgcagagagcagtgtcataggttgcgacagtgcttttattaacatttagacgtgcgccttgctgtactaagagccttaccacatcgagatgactatgtgaaaccgctcgataaatgggcggatctattaaaccccttctattgatctctacgccctctatactcagtaaacaagcaactgtcttcacgtgtccgtgatatacagcaacggaaattggagagtggcctgcaatgcagagattcagagcaatccctggcactgtaagcagccgttgtagaagtatagtatctaatcttattgcggtatggtgtaaagatgtagacggggactcaagtctcccacggcctctaacgaaattaatgtcgatgtctttctccgccaagagcctttcggttatctcgtcgtatgacgagtaagtagatagccaaagtggtgtattactatctttgtctttgcagttcacgttggcaagggggtggcccaggatcaaattgactatttctaagcgtttggtttgaacggcgagatggggtggcgtatagccattccggttctggatgttcgaattcaggcccttttgcctgagaagtcttttgacagcctctactgacctataggccactgcttggtgaataggtagctcagcctcttgtgatgatttggtactaagaaacactttggtcatcggatcgtttgaaaaaatcatttctatcacgggtctattgaaacgacatgcccaagaccacgccgactggcctgaatcatcttccaagttagggtcgctgctacttaaaagtagcagttgcacgaatcctattcttcctgcgaagactgctaggtgaagcgccgttcgcccgtatttgtgtttaatgtccacactggcggcgcggtgctctagcacgctcttgacgatggagaaacccccgtagtggatagcatatgacagggggctgtcgcgcgcttgattttggatgttgatatctagatctcgatggctgagcagcagttcacgcacagcagcggaagtgtatttcaacgcccgcatcaaaggagttttgcctcggtaaaatgcattgatgttggcgttatgccggagcaaagcctccccaagaccaacgttgtcgtatttgacggccaggtgcagcaggttgctgttctgaaatttgatattgtatctccagatgctgggctgcagtttaaaatcgaagtctttgcatgatttttcgagggtaaataatgcactgccgtccaaatgtgacacaatccacaacaaaagctcgttgggcagctctgtaaggttttgctgcaatgtattagctcatcggtaaaatcagcaagaaatcaaaacagaccatgaccggataggattggagctaggaagcaaatgaaatgtaaatgtggctgaggtctgaaagttggacgccttagatatctccctcagctaaattctgtggtcagctagaagtgtagcccgtcactccgctgaggcgcgtagcaaccacacggcagcatcaaagccttgacaagaatgtttgggcggcgttgaaggatctctggcgtctagctcccgggaacgccaaatcagttcctggttatgccgatagcctggagaccgaatctaccttggtacccacttctcacatctagcgccataagagtaaatcatagcacataacgcgcatcaaagttccataggcaacccagaatttcacccagcatttgtcgactttgcggctaaccgcagtagatagtctgttcgccaatacatggccatcgcgatggacagtcacaagtgcagctgattgcagcagtggtctggaatgatatcccttctcgcaggccactgattggccgtatagtggcgcatactgcgtgcgaatgcattctcggacgtaccgactgtttcaaggaagtgttccatgccagccacgtagccatataggtaaggagccacggcgatggcatataaagctggcgagggaacgctgcaagatagtccaacaccaattcccatccgaagcattttctgcctttgtccaccacctcaatgtccgccatgctgccttggaattcgcttcttgtttgtgagatggaagtcagccccaatggtggtcctggcttctgttgcaggatgacgaaaaaaaggggctccaaccaaaaactcggtcaaacgtgaagacaccaagataggccataaaaagctgaacactgtggccagagagctgtttgacctgtcaaacttgcaatcgaagctctgtgcttttgtcaaagaatctctctgtgcaaggtggcataggcaacgacaggccgatggggttggccagcagtggtatgaagcagctgtccgcaaccaggcgcgagtgtcacatgactctagagttgcatctccatccattgtgcatccgagccagcgtcagacatcgccagcctccaggcgacgccctgcatcagacaacactgaccggtcaccacctcacgggctcacacaagacccgccggggcccgtctcaaccagctccgagctggtgcaatcaatcaatcccgctgtcactgccgaaatgctgcggaccaacggtgttccatggcacgtttcgccagctcgaccagctatcctgacgtctgtcactaatatctgggcgggtgtccaagacttgacgctccagagtctcagcttgagtgaagagctcgaaaaagatccactgtgtgttttgtttggccgaggacgaggaacaagcaaacgaatgcgtgatcctgtgttgcgatcagtgccgagcgcatgcccatccatcctgcgtggaagagtggttggaaaagcgacgtacaagctttggcacgtcatgctgtgtgtggtaagtatagatggtttcaattccgtaatgctgggatgctgatgaatgctgtcgaaacgaaggaactctagacgcattgattcgtccactccgagtcctcttggcagataccgaaacaaactctgtccactcggcaagcgaatcatcaaccgatagcgagcctgtcagcgtcaggagtccagcacgaaacgacccgagtcagagtcaatcgcgtcgggggtcagtggaatccctaggggtatcaatcgagcagagtgggccccgtcgctcagccagactagcaggggctcacctaccgcgagattcttctacctctgcattgcttcgccggtcggcacgactgaattccaatcagcgtaggtgattacaatctacagaaaacgcgccacggaaatgggaaattagcgaagcagctgtcaatcacacgcgactccatatcctggtgatatggagttttggagcaagcttagcaaccaaataaattaaattccgaacttcaaaccccacggcacactacgagatcatttcatatttgcaagtgctagatgtcaatgtaccttataatgttattcgaagtctgcttcatttcaaatatgttttagctcgaaacagagtgcccgtatatactgtaaatcatcttacataccataccctagaccctagtcactctctagaaacataagcaaaacattaccgaccaagcggtcattagccggacattgactctaatatctatccaaggcatgaatggctccctttcacgatgtcttatctttgactggacttagaggatcgaagccagcatgcgaacgagagccgacaagcaccattatgatgataagtcctgtcgagatggacaagggatatggacctggctcttctagaattggtattgacaacagcccttggctgttaggactatttcacaagaccttactcattcaaactcaaagattattcctgagagcccatttggctgctttgtcataatgaggattccatgaagtaccctgcttcgcttaatcagttgataccatcaacacaatcagccagagataaagataaattataaaacaaatcaaggggaaaagccatcttatgcccaccaagccctagctatttgggacccattctcataaataatcccgttttgttgagaaagttggacttcatcaggcatagcatcgatagcgttcacaggaagtcggtctccgtccccgggattgggtctttgcctgatcgtacctgacatatttcagagggtagtccattgaagaccttccgaggatgttgcattcctaaactatgcccttccttttcagaaacgacgcgtctgggtgcccgtcgtctgtcaaggtgcgccgcttgcctttggttcgcttcaatcatttctgatagcaaaccattctgcttggccaacaccaaagtacactgctcatcagagatatttctcggcgtagaaaaagcagtaactctaggtaatgtcctactgagtcatgcaatcgaagaatgggaacccggtgtcaacatacaatgcagagactcccaaagccatgcctatgatcttttctaacagttgtagccgttgaatcaagattcgcaactctatgtcttcgaacatatcaacgtcatcaccatccagttcgtgcagggagtggttggaggagtgactggtccactctttgaagccaatctgaaatcttgcacaggcatcttggccacccaaattgtcatccgaataggatgctggacttcaagatcaagcttgcaaagaccgcccaggtcaaatgttgatgcaaaattccctagtgcattttcaacgaaaaacaattgtcgacaaagctctttcaaagcctcatttgtacgcccagtagctttcatgtcttccaaaagcgcaagaacgctgcgctgcgcagcttttgcggcctgcgcagtggaggttccggtacctgatggttcggccattgtgagcgaagaactagagcaagattagttgacgcctctcaaccggaaaaatcaagggtgggctcattctagtacaaaaggatagtgcctattcttggtgtagattattgatggcctgggaatgatgaggataatgtttgaaggaggattcaaatatatatactgtctggagtaacatcacttatctcagggcttgttagatggttcgggttcctgggaacctgggtgattatgaccgaatgattggcctaaacaacatagcttgcacgcatctggaattactctgctgggctcttaggggtaaagcattaaagtcttactggttattcgtgtccttttcgtaataatctgttcagcgcaaaagaaagatgattgctcatataagccttttgatgcatgcgcttattggcgagagaagcggttctttgccgccatatcctaacgatctttctctagtactccctattccaggacgtatcgtaaatttcttagtggactcatccaatttccctagtaccggtagtcatccgaggcctgattagcaaagtattcccaggagcaattatcatagaatggtaatgctgattgcggtaaaaagccctcaaagccgaaccaagtatggagtacatgagctaacagaaaaaaacaaaagctgctaaatatagacgccaagcctgcgaaatataccgagcagatgcataccacacgttactgcacttgtatagatggacgtctgaagatctaggccaacatagaataccattgaacttactaactgcgctattacagctctcctaagtaaaataacctgaaataactgtccgagctcttcaattgatcttgtatcgttctgttagtgctagcagttgctgtattaaagctacggagttgaccgatgcatcggagtgggtccggggattcgggagatcgacaagacaacaaaccaaaccacaaccttacgcatgcggagtacaggatccaaaaggatccatttacggtcatattattcgtcggctgtgagaaccttgtaactactatcctgctgcctagagcgtgacctaaaaattagaatcagaggcgccccctgaacgccccttttcgcggttcaaaccccggttgggttcatcacacaggtgacttccttgacttactccctctctcctacctattaccatactctgactgatccatcgaagaacacgatcaccatttcaaaatgcatcgcctccgtgactccctgctgagcccttcgccaaaaggcttccccgtcatcggcgaggcagacaccgtctcccatagtcagcaggatgtgcggcaaagtctcgctcggggtgaatttagggaggttcggggagcagccttcttcagccgaacatggatcgtcaccgacaggtactgcaatgttaaggatggggtggattccctcgaaggctacgttcgtgagatatggtatatgtactaccatctcagcctacatacgtcgcatgaaactccagaacacgatagcctggtcctcgatatcctacgaatccagggaaagggaccgttaaccagacctgtgaaaggaaattacggaatcgatatcgcacgactgaccgaaggcacgctatggaatgacctgccgttcttggttaccgacatgactgacttatggatcaacaactgcggaccaatgtcgggcacccagcgcctgaactttgcctctttcttggcaaagttagcgtcaacccgcgtctgcaaggacagaatgtgccaggtcgcccttgtcctcttccgctgtgcatttgaggagagacaagagcttcgcaccagcgaggatcaggataatgaagatcctggccggagcatgggatccctcgagcttatgcacttattgccatctgtccaggcatggttcgtcgaggcaaggtacaattttttgcaactctcagaggtctcatggaatgattgccccagcacgattggccagggtggcccctgtttcatcgagtctgatttcgggaagcgttgttcaccgactgggttcacaccatggagatggatgtactggctcaagcgactccacgagattcaggatgcggcaaaggacgctggtgagaaacgtctcaagcagtgcgccgtcgaggccatttccagaatgctcatggatgtgaaggaacgaaactctgacatcttgagggttttcaaagatgctggggatctcatatacgaagataaacatttggtatctcttaaaaggattgtggagggcgaaggcccctttttcccggagaacgaagatggcgaggagagcgaaaagacagaggggaaggaaaagctagaggaaagcaaaatgccagaggggaacaaaaaggacaactgagtctccctctctcccgctttatttctcgggtttcatagtcctcggacacaatttgctcgcctctacccctattacttatgaaatccagcgccaagtcccctcggggtttcatattaaaagcaaaagaacagacaattacacttccataattatccatcaaagcacgcatgtttaggaaattgcatttagcattggactgtgcctataatcaaagctattgtacctatgatgaaaccttatcagcgatagatgtataacgggtgtactaaggaattaaattgcgggattttggcaggtataaggaataacgaagtggctgtgtgaaacattttgagaaccccagttaatccttaccgcataacagggaatcggcccccagcattacccagaccctgatttggcagtccggctcgcaaacaagtttgaccccgcacagaagcaagagtagcgctgctgcagcagtttgatagttatccctctagcctatttctgcttacaatgtacatgtgtcgtatcatagtactccatttcacttccgactacgatcaaaagatgctggatatattcgataatctacaaccatttcgttgatgagcaacaatatctagctagatatcaaacgagtgtctttatgaaataagaaacaaaattcgccgaaaattgaagctggatagatactgggtgtatatgtatcacccaccgagcagtccttggttcgagtccttgtgggtgtagggtagtaagcttcgagaatcacagggcatctcgcatatcaccaacaagaagggaaccaaaaaccattaaatgccctggtgatcgcagagaccatctagtcacaatcgacagcgttgttgtaggtgtcgacggtacatttgttattatccttggtgcactggaaaaaagagcgagattagcacgaaatcgattcagatggctacttccgaatgattgatattctaccttcttgttatcaaacttggggcacttgataaaagtgtcctttccagcatcgttcttgtatttacattcgttcttagatttggtgcatttctgagttgtggtcccgaaccgttagtcgcgattcccaagtgagtacttaaggtatgggatattgatgtttactcactccggtgtatttggccaggacaccggcctcagccctggcatcgaggtcgtttgatacagactcaatgggggtggctaccccgcccattgcagcgaagagaaaaagggcaactgtggtgatttgcattatgaagggcttgagatgatgatcctctggagaaggttaaagtggttgaagatatcgaaatgctgtgatttgagtgatactatatggaattgagggtcatgaagccgcctttataaaccagatcatgagctctgtgtgaaaggtgacacatacaatgctcaggtccaatgcagtcatcttgggggtggcagcttatggattgcatgacttctccaatgacattaatgcctcacatacttcaggatactggacctcttggctggtatattcttacgggtggggtctctccaaaatcccttacctgcttcagcctccggggtaagatgcactacttgtttaccaggaagatatttttgggcttacctagtggtaatcatttcctaaaaagcagagaaaacggctgacacgttgacacggtgactgggccactcggatctgcaaaggacgatggctgcattgcatttgataaagttgtttcactaggaaatgatctccaaatccaaaatgttggtatatgagaaggtttagcatatggcggatgcttataggtcgaaaaggcaaaggcactatactatgtatgtatctatgtgatactgtgatacagccaagctgtaaggcagctcccggttgtgttacgtagggctggggtagattcgagccaaagcaaattaggaaatgattcgcgggtagtatttcagtaacataagctcacatggtctaggcggtcaaaagttgcatacttcaaggtgggatgggtgggcttacagcgggatgctagcccttgaacaggggttgtcctcagtggcagccccgcttctccttttgtgtaacaaagtacatagtccgatcatactgccaaggttcgctcggccgaaagagcagacagtaagcgctggaagagtaaatccaaatcttttaagatatacaggccttcctacggttgagcttaaaacatgaagtatgaggggagtggaaaaggtactttcagtcagagaagagtattgttagtggtaaagaaatttattagctttcagatagagtagctaactgatttaatatcgcactgatgaatgaacactacggtcattctcgaaatcggcttgaccattacggagtacacaccactgaacaacccttttctggccccatcgccaaggccttagtgcagatcaattattgagcaggaccgcattaaattgggggtgcagcaaaatgtgctttgcatgctaccataaaatgctacgtacattacgcacttcgtacgaaaagctctctgaattccattgacccaacgtttgatccttgcaattacgactaggggagagatgtaacatgccttgtactgggagatccgccacatatcatccgctctctgtttcaatcgcacgataggcacgcctttctttactggacaattgcacccgttatcaagcagtgctagatcttccttcacctctcctagaccacgctaccattttcaatcaggaccaaaaaagtacaaaatacaatttcttaaatactttccacatgatctccgatgtagagcttcatatcacaacaaagcaaagcgggcttattagtttcatatatagctatttttacatgtatcgatattatgcccaatttgtctacacccgccacacctatgctgccgccctcctggaaaggtagtaaaaaagatggtcgcacatttcaatctcgtgttctcttcgcaggcctgctgactagagaaaacctctctcgcgctctgaagcctgctgattgggaagtcctgagtaggtatgacgcgcttcacgataacacgtctcttgacggagtgcctcagatcgggggtcagcgctgaaaggtctctgtaattaaccgcccagaaccattgataccgcgtgatgttaagttttcggcggcgttttccattttctgtgggttgttgttgaaatggcgattttccaccttgctagcgccgacgaagcccaccgccaggaaccgcgaattctcgcgcatttttcgcgatattggtttcgattgtttagaagggattcgagtgctttgaggatccgatccttgatttctctattgactttaggcatttttggcggagttgttggcactaaatgaagctttctttcacatggggtgtcccatttgggtgtcgggccctcgcatagcgagggcccataatttttgtaatttttgtgaggcccggttattacgcaagtactatgatccgcagaacctgagcgtttgggtgagcagccaacgtagagatgttcatggtcaggtgaatttcactgatgccgggacccactagaattccgtcgcagcatattgatgatgctagcactttcttcatcgtgggtcatagctgccggtccactaagctgtcgccgagttatcgctaacaagtgacgtagcatcgcctttatagtggggactaatttaaaaaggacaatgctgggtcaacgtggaaaaatattttgactacggatatctccgcggcattttagcaatgtatgttcaagccgttcctagagagcagagtttttctctcgggtttgttgctcaatgctatgcataatttctaccagtttctgtgcgtcgtctcgagtccgttccatcagctcattctgttcgctgatccattgcagtcgttccttccagaaatcccaccgctccttcgagaacgatgagtctcctttccatagattcaaatcgggctttttgtttgcttcagcaagggtgaggtccttctttcctacgaacttgaaaataatggaccctgcaatctcaaaaaaaggaaccatagcatgaacatcagtctataggccgaagtcagtatctcaagcacagtgatcatattcttttgcgacccacattcagcataaggatgtaattcgtagccacgcggccatctacaaggtgatagcgctgtaagagcgacggcgagggcggcggaagtggcaccggcccgtgtttccacggctcctgttctaatgcaaagacggggattcgcaatgctatgcttagttcgcgtgaaccagggccatgcggtggatatgcggaaagataatgcgcgcaaaaagcgctgctactgtgaaaagtgtaccacccttcaaaagggtagataccgtatcgcatttcccagtaacctgtaatcagaatattagcccctacattaaatcaacataaacgaccctctggaaggaatcttgggcgaaagccttgtgtccaaaatattggagagaatcaaagaatgggatggccattttgcatgatattttaggggaagaagaagtcacgcacggtcatgagtctcttcccaaatgtccttgaatacggccaagttcctccagtcttccagccgatcctggaagcgtgacgtgcgaacctgttcttcggttctatcaaggtctggaagagctcttattgcctctaccagcttcaaaatagcgggttgatagttcggcatctcaatagcagcatcccaaagtagccatgaaacgcgctcccctttatccacagcttgactctggcgctcttgaatcaggtcatcttcgttacgaagtgacatgaagcgatgagcagcgtcatctactggaactgcattggcagtgccgtaacgctcaacaaattcctgcaatatttgaatctcatcccaggttgggggatctgggtcgccatcctctgggtctggatagaagaagggtttccattcggctttgtactcttccattgttgtgatggaagttgtggtgatttgatctggggtcgccccagtcggttctgacaacgaaggcgtactttcaagtgaaagtgcttaggaacagatcgctttttcggggcagtatggtcatacaagagacaagcaaaggaggcttcgctggtggtcagacctctggaatcctaagttgctccacaatggatgctcttagcacccatatagtgtcttatgtatgtatcagcgaaaaatgctggccaagaagcgctatagccaaagtagttaggggtggattcgaaaagagatttgaagagtatattcgatttcgaaatcattttgcgatgtcattattcgcattcgaaatttctattcgaaaagttatgcggaagtctgccaagaaattggttacgtaaatgattggttaacgccagcaaatccacccgtgatttagcgtcgtcttgtcgcgcacgttgtgtataccaaatcctccttacatatggatctcgtaatttgagactcgagcctgtggatcttctcactatcgttgatagcagtatttattttccgcctacaatagataacacctcatcttaccttccgaggtactctgcaacgggtacatggtaaggccgctgaaataacgtgacaatggctgagtcagattatctttggtcttacaccaatactcccttctctctataggcggtgtgtcttgtcctttcgtacgatgtatgaagttagctggccagttacagtatttgcggataatgtttcattcagcatgactcaacaacagataatggaatcacccttagaattagttaaggcaagcacaggtcaggacaagtctcccaggagcaagatatctcctagaaataagaaccgtgggtcctgattgcgagtttcaaccttcaacactctcttttggccctgattcaataccacctgctattcttgaaacttggattgtccttcaaaagcccccagatgacatttgatctattttctacttcatttccacatccggcggaaaaaggccgtttccaaagacggcatttcttcaagcacaagttgaaaatccgtatcccgcatcaggatttccaaattccacagtacatagtctcccaccaactttttgatgtctcccatgccctcagtctcctcagaatcaatcttctcaaaaacaaatttgaatagaattacaatatccccagttcgttcctcacaaagggcgaagtttgctagcagccccagaaggcggttgagtgatagatagcatagcgcagtccaccccgttctgaaagcgaagcgatacatttcagcatggcaaagaaatatatctgcataatgtatttagggtcggtgctcgattcgtcgttggctcggtaagtgggattcacctgaccaatccttcgtgtaggtcggcacaaacaatagggaacttttctggatgaaaaaagttccaggtaagtctggcaggatcccatcgtctcacggattccgtcaatgattgtatgccgatgccgtcgtagatcggagagggggcggagtaatcaccagtatatacaaactcgcagcaacggccaaagactacctcgtcaatgtcctcgactataggaggtcgaagaatctcgcttggaaggagctatctaactccttatgaattaagaatcgctttcggtccttgccaacaacgaacaagacaataccagattccatgaggctatgtgaacaccagtagtaagaaccggtacaatgtgagagatgaggactgttaatgtacctatgatactcaagaaccattttggtagaagaagacgaggagtccgtttcaccagcctggggatgaaaattgtatctttgagggtcgtcggaagggagctgaagtagaaattgaaggatagaattgcttactaaatatagggggctttatttcttgagcgagcgcttctgaagggagaggagagatgaaaccatccattgtggcaagtggtgcatttatattaaacttaccaagtgctagctagcctaggcgaggaaagaaagtgatacgatacgcatggacggctgcggtactgaggagtcaagatggagatggactgcagcactaagcctgacatggattggtgctataacatcttgctcaaccccctcagcagcaagcaggtagttcagttctctccttgccgcagcacatcctctgatgcttcagtacatttgaatcattttaccaaaaccataaccaatgatgtcatctggataatcgaagtccacacactgaaataaaaatgagatccagttctctcttctccgcagaacatcgcagaactgcgctaggattcgaaatgagcatatgtggctagatcttcctcctgctgttgctgctacagctacttcggtacatttgaaaccggtcctatgaaagctaatcaggccacctagttatttgaattcaaggatctaatatattctatgcataacaaactagtataacgagtcattgcttagaacctgcgcgccatagaggtccggtcacagttgagtgagaatcattagcatggcgctgaaagtgcatgacttctgcaatttttttatcgcatacattgcaagcaataacagtgcttgatccaaggttctgtagatgctttcgcttgatatgcttcgaaacatctccatgcgatgagaatagttgcacacgcttcttgagggctaggttttgctgtcccacacaaataaagcaaaacaagggtcgattgtcctttgtgacagatcgaatagcattttcgagtgggcttgccgatttagtctggacctcagtcgtttcgctttccggcttctgatcatcgacgtaaccgctctcggccacatgactttcaacccttttgttctgtggcaaacgacatgtgataccttcctcaaattgacagtaagcggcaacagcatcaatagcttcagtgcgtcgacaccgaatgctggatgaggacgaccatgaataggaggacaaaatagtgctagtagttgttgtagttcagaggtatgaattgtattttattctagagggaaagatgaggttatatatacaacacggacttacaatgaacttggttgtctgtatagacatttcggagctaattccgatggtgcggcttgcttcctgatctgcactagcctcatgtcacgacagtagtatagaaatgtattctgatcctttgttttgattgccgctatggaccgcgaggctaaacgtaagattcaaagttgtatagtctacggtatccagcaggggaatctctggatcgtataggatatcgtaccatcaacaattgtaggaattaacaaggtggttgtttttatatgtgcttcaggggcggactttgatgactaatcagtcctgaggtcactacctgcaaacagtgcaaaatagtgtttgtttaacgtgtcatttccccgcgctggacaggatttccatccagcgtccagagctctgttttgttgcccatgacagtgatggacaaggcataccttccgcaatggggccagttacccgtcgagcagtatttgattgtgagtgttttgcgccactgttgtttcccctgcgtggctaatatctataaagaaacactgggatcactcctcatctgagcctactggagaccagcgcctccgactgatccgtcagttcttagatctagatgagattccgaaggaagtgcaccctaattgtcatgcctcagacacttacgaagcactgtcacatttccctacggcctatggaattgatactatccttcgcccctggcgctctgatgacctacggaagatagcgtggaggatttgggggtgtgataacgatcagttgattttattgcgcacctactataatgccgatgacaacgaacaaatcacggaattagtagggtctgatgagctccacgaggagaatgtagcctggtgggcacttcttgataatcccgaactcttcaattttggtgaccagtggtggcgagtcttcgatatcttgccagagttagccggccctttgaatggttatagccgcctgccagacccagaaagtatctcacgggagagacaggattttaaggagagactaccgaccctcaaacaaagcgacgaatggacggcgaatcgtgataattatattgaaagagagtttgcataccttcggcgaatagcttcagagggctatcttgctattgcagatcaggaagcttttgaaacagatatgctacggttaatctattatgatgggaagaggaatattgtccaagagacccggacagaattcgatgagcagacatttgctgatgttgccgttgaatgggaccagttgtcgcttcctatgcaattatgggaggacggaaagactggtgagaagtatcgagtgaatggggagctgggaagggagttatatcagctagatgaggctgatctggaataagcatggccatgtcgaatctggtggaatcgtggcacatgatatcgttcgtttgctcgttggcgtcatgtatttaggcgccgcctcttcaacagagggactcttcatcatctttatcgtcaattcaatcgtttatcgtcgttccaactgcttaaacatgtgagcgttactagcgccaatatgatagcaggttggaatcaacgtacagattctcccggaccccggctaggatgcgtattgacgggtcataatacatctggtaaatgcgtgcataagaaccaaccgggtacaccacaacacttttgacagccctcatgatgcagcttcctgtatgcccgaggtgattcttgggtagtgagctctcattggcttgcctgtgccccgatcttacccaagataaccaatgtcaaattgtaggctaagaatgagaagactttgcgtctccttccccttgcaggtggacttgtgctaacagcctgattgtctgcagaggtacgctcatctgccaggaagcaagacaaaacatcagcattcctgcgcctttttccacttctggaaagacatcaaatgtcatccgcagacaacgaggatcacgcattcgataccagcagcctacgccacttgaaggtatttgaaaggttgcatgcttagccacaggtatgattcgggtagtggtataggctgatcggagttcaggagttgtatcatgtagacaaatcgaacaatgacctgatacacagaatctagggagaaagaggccgaggtacgcgatacgaatattctggtgactcatcgtcgatagtagtcatgtggaagggacagagagcatgcgacagtatttgtataggggagctcgagcagacaagacatttgttcgcgtggcattcgacttgagtgatagaaatgagggtgtcctgttatacgatccgagtcagcaaggattgatctagttggacgagttgtcgtagcgtacctgttcatggaaatccccaagtacgctcgagacgggacaatcagtttgcgcaatgattatatcggcttcacaactagatcacttacaactttctgcaatgcagttaccagccatgccacgtcgtattcaagctcatcgtaatctgcactcgcttcaaaaaagccgcgttggggtgcacaagacaatttgttgagacagtaaacgcgcgttacgaacccacttgcgataaacattgcacttccatggtggatgaatgtgtcgcgatgccagaggtccagggactccatagctgtatgaaggtggtgggacgagggcggaagacgcgatgaagcacgctcgtcggccgctaccttggtcttatcttcgatctggcggaataggccactcgcacagtatattttaccgtcgatgatggggtggccctataatagcgtgaagatgtcagcggtgttcgtggttagaggaataatgcttggcgcggatggtcagacacagcgcagctgtaggcgttagatctcacttaccttagcatggaaatgggagtctcaaggttctatgcaacgaagttcgcacatggatggccgcaccctgttgttgactcgctatcttggtttgcgatcttctacctaggacatgctgcattgttcgaagcgacggggctaggaatagtgtgtaagccatggctttgcgtggagctctggggagctcccaaaggttcactgtcaattattagccagtagaccagcgtggaattccataactcacattttctgatggtcaagaccagggatgaagagtggcccttgctctggtgcattgtgttcgaacgtctacggatctggctgtcccgcgtctttcgggtcagtgcagtttcaaggatctgtgggcccatatacctacagtgtgagcagttgcacttcaaatatgtggtcaaccagagccgcgacagtagaccggctcgctatagcagagacctctttatagataccttgactagctaatccaaatcttgtatctccgatcggctggcgtaaatggggcagtgaatctgcttggaaccacgtcccttaaagtacaggaactgtctggtttgctggtctacggtgtatactataaatgtcagtacggtataaattccagtactcgatcaaaggggagaacttattgagtgcgtcagatataagcctgctcgactttgtagaatcaagtggataaataggagagcaattgcaggggtagaggacgtatttataggcttctcggcttctgttactcaccgacctggttggaagtgttgaaggacacatttcctaattgaggcctgttgaaacccgcgtcttcttttaccacaactatttgcagcgacatttttgatgccttcagatgcctagcgagagacgagtaagagtggtgctgagagaaaggggtgctgactcggtcaagcaatgttggctgactgttgaatccttcacgttcctcttaaattgaggctttgtgggagatatctaatccgtaatgacaggtatgtattcacatatttcttgtcctagtcacctcatatgtttggcgactcaacgttggatcactgaaaactcctacaattctgtccctagggatcatggaccttgtttctggcctcgcttgagtgttgtgttggtttgtgttgagctgtgggtctgtccgcctgcctagactgcagaaagcgaggtcatatacagtaggatgtgcggttgctcaacccatcaacccgttgaagcttggccaaacgttgttaacactcaattttcgaagttgtgaacaaccttcgaagatacatttcttttcttttcttttatttttcgtttctttccgaatatcttttttggtcactctaaggtctataatgctgtttgccgagtttctgaggcttctaacgggagtggaagaggcgtctagttgaggtatctctcacgtcaatgggtgtttatatctggccctcaatatcgtcaggctcgatcagttttcccgactaacccgttgatattcctttcaaatttactacctagcgcctgttgaaaataaaagtaaattctattcagaagctgacttgactgcgttgattgactatgtggtgaccgtaaaacccagtctatagccatctgtgtctgcatagtctataagagataccaaggcttgtcggaaacagtactatctagatccttgactttttcctgtggacaaaatggactccttaaacagctcgctagaccaggaaaagcaaggagaacagtagcctaatgaattgccgatccttagtgaaaaggactataatcaagagccttcagatcatgtccctccattggtaagtgaaaccattcggctttaaatgctttggctgactatcgtagacctccccttcgtaatacgaagaagtgataagatatgccttggcgaccgagccgtttcaacctatcttgaaggtgctagcagacctcgaacgtgacgatcccaagtttttattcccagcagcccgactcgttggattctatcgacgcctatgggagtcatgcgtttctaagcacattgatctccaaaagattgagcagagtaatgagatcttgaaggaggctggtatgtacctgagaaaagagagggacggacttcagctttaccacaataagtagctagcttgactgcgcttttttgagtatgcaatggaattgtctcgggaatgactgattaacctactcgatgactggaactacccctacagtcctaatttggccgggttcacggacgtcgtaagagaagagtaaggaattgcctattttgggttgccctgtcctatattagtaacatagaaatactacaagcggcgatgcagtgtaagggaaattacaccgtatacaaagtaggttatatattcccgaggcttttaacaagaagggtaccaaatagtcattatttattatcgtggtctttactgaaatgagtatacgaataatcccgcttgatttagattaatctcactcgtaattactcgatatattatgtacaaaaaaccgtgggtttagggatagcgtcgggggaagcctagttaacagagaatgtaccgagagactcgaatacggtagggattccgtacgaggctaaggggacagccggaagatagtgcctgttgcacggacagtatgccaggtgattgtgtctagcaactgtctgcgaaaccgacgaagatttcccagggctttttcaacccgcggcaggaagaacatatcctctcctatagtcttaccagacacccgctcaaatcgcacaaaccgaaattctatccagtgtacctctttagggaaaaggagcgctgatatctggaggaaaatgtcgctagcccgggtagagttggtcagaggatctggacctgtctacctgaacccggatagactgtcgagattgggatagaaaaggtattcgatcaaggaaggctcctgagttccgtattctgcagggtcgtctttgccaaaagaatcctgccacagatcattgggatcagtagcgagacagggaggcggtgtcggtatgccagaagattcatgccagatagcccgaaggtcgagatccaaatcgtagtctgtaatgttagcgcaaactcctatcaaagaaacgggtacagaccattctcgttcaatccattcatttctgctatatgactggccgtcgaacgctgtagggagaatatagaggtgtgtaaagcagcgatttaacgtgggttggaagggatggaaagctggagacggagcagtttttattcctctctattacgcagaatgaggacaaactagggaatctataaccacatgctaagttatcgaatgcgttgaatgtatcaacagcgtgcaccgttggccccgttcaccaacccaacgaaagttcactagcagtataggccttatctatccttagggacaacgcaaatagatagcagaaaatcccataccattctccctggctcgtaaacgctctaccacatggtgtctctatcaaggcccaggctcatcgacggactaggcttgaaaatcgctcgcttccaaagctgaaacaacaccattacaaagagcctgaaccgctcgcttgcgctcccacaatactgaagcttgttcattgcagagctgtagaaggatatcgctatcgcttgctagcaagtcatttgacgtttgaagctgtctctgctcctcctcgagtcgtattttctgggccgatttgacgacgtagcattcccataggcaaactacaagtcgagcaatttgagggctggtgtagcgagggagtcattgaggtttactacttttatgaactccgccgtaagggtacctcgtgttcttactggaagctattcagtattagtggttttttttaatttcccgcccaggggggtatgactgaccttggcttcgatccaagcctggcgttgaaggcgaacatctaggtctaccagtctttccatcggtcaaagtggtatggtatttggcgggactggcctttagccgagctaggtatgacttggcttcgcgcttcgttgacgcagaattcaaaaggcttagaaagaattcctaaattaaacaagcggttagcctatgacacagaaagaaaaaaattcatgtgccacttacccgatcgagcaggttcttctttgcgcggtggccgagacgatctcggttttcgctgctgcccgagaactcggcgatttgctgggttcggacattcagcgccgggcgcgccgcaattgggtcactaggacgaactagatgttgcttcaaattcttagtcagtaaatactcagcattagtggggtatatccggtttatttaccttcaccaacgaggatttggccgttcgagaccagttcagcgttcgagagctcatgattaagcgtatattttgcgaccaatactagtgcacatgagctcgaagcagagtagttttgacgtagagatcaaactcgcatactcggtaccttgtcatccaaggagccttgaggcaaaggagtgttgcacaagatacgcagaaatttgaatgatcagtgagttccttcaacgaggctcatctcgaaaaaccataaacctattggaaactagagagattacgatgttctaaagacgtagggtcgaggatctataaatattccacatagagtgatcatcatgacctcagtctattcgcttggaatacgctttataggagtgaagattgtactgcaaggtcccacaaagctcctgtccttggagtgttccgcatcgccgtggtcaaggatggacctgacgtcaaactcttcagaaaccccggggccttgacgaaattggccctgtggatcgccgaggccattcgagtccaagagaaagagcgtggtgactcagtcaagctcggtcagaagggagcagcaggaactcctctcgtccttgctggcctcgatgaagaccgccatctctatgtagtcgtcggcactggtggcggcggcggcgtcgttgacttcgctgccatcgccaagcgccaggaggagcgcaagaagaagaaagacgtcaaggagaagaaacagaaagagcgatcagagcgccggtcccagcgagcagcagagcgtgccgaacgggaagaagagattggtgcgaagacgaagaatcagaagagtccgagtcctcatcagaatcggagtccgaggacgaggaagatccgcgtggaagcatcttctccgcaaccgatttggtattgccttccaggaggtagtccaggagacgaatgcgcgtgtgcgcatcgacagtttcgagcattgtgttgtcaaggtccagaaggatgacctcggcgggttcctcgaagcattgagtttccgcagtgtggtgggctaaatcctctacaaacacaatcacgcagtctacgacttgtctttgtttacttcgcatgggatgtaaatgatatataggatgggatactggactctgaaaccggctacatgcataatgtccgttgcatgttctacgcttgcaagcattcaaatgcccttcattcttgcatctgtctccaatggggtttatggcgttgttgaaaacatgtctgattctatccagtccatagttgcatcgaatctatgcattttcggcctttccgagagcccgcatatccacttgttaaccttcatgacttcgtctgcttttagatagaacccagactaataggaaaaacaatccaattcctcgccatatcgcggcacgattacccggtcctccgcgagaacgtcctcaccaaccccccacccgcaaagtatcacaaggcgcaagatcaagccaaccggccaggggagatattttaataatacatgtataacaccatttaattttgacacatgcgattctcacatgttctctccccccattgaaagttgacactaatcccagtcctcaatccacgcacattgtgccaccacccaataggtatatagagacacccgccttcatgaagaacaatctccacataatccgcgtccatgaacccaggctgcatttcctcccattgctcatactcagcaggagaagactcaatagcagccagatccaccttggaagtatcggacttgtcaaccagtctacgagtcgttggctgaactccagatacaggatctggatctgccgtctcatcgatagacgtgacccattcctgttttcgagggtgaatctgagattcaggcgtgcgtggcgagtacagccggatatactcaatccatgtacagatgacttcggaggcaaaataaagtaaattcatatcctcaacgccataccacttcacgctcaagtattcattgaacatccattacggaaaggcattaaaatgctgctaccaaagcagcacctgcaacaccgacaaacatccctcctgacatataagtcggcatagaagccaatcccgttgatgttgacgtcgacgccgtcggtgtcggtttcgtatacggcacaatagacgtcgggaaatcccccacagcatccggaatctccggaccatctccaatctccacaatatcgtccggccccggattcccattcaaagcagccaccccaacaaaagcattattgtaattgatggccatatacatatggtccgagaaactggtgccaattgtacctgcgaaggtatcgtcctcctcgtcttctggttgtatgaggaagacacagcgttccccgtattgggaatcccatggacggaacagatcgctccagggtgcggagatcgtggcgtctccgaaaattagagaaacggtgtggttttccgttttgcgtgagcaggggagtaatccgaactgggggtcttctccttcccatccgacgaaggagatgttgtagtctttgtacatttgtagtactatatccttggggagggtcgttgtgatgtattgggtgctcagcttgtacggcttcggactcgatatggtgtaatttgttgggacgttcgagtctgtttgtacttggaatcgagagagagggagtaacacgagtccggtggttatgttaaagccgaatgcctgtaatgggccgtgatacttggctttgttgataccaccgaaaagtatacctgcgcctccgctttcggatatgttgccccatatgctgaatgagggggatcggattagatcctgattgatgagatgataagggaatgatgtgttttccggagatagacctatcgagttccctggattgtattagttttaagtctgaagtcatagaacgaaggtatatactaacatctttcataagtgacctttataagggataatccgacatccttcacttgggtccctcctatagtgataatgtcggtgcgtatggtgtctggagaagatgaccacttatgtttacttgggatttctttcgtgctgttgctggatgattcgctgatattgtatgatccaaatgaggtgcaaaggctattctcccggcattttgagttttcgtagtttgtgtcctcggtaatgacataaaactcgggagccaggaggtctaccaacatgcctatgggctgcggtggtgtaccaattgagacattgatgaaatatgctgtctgtatagatatattaaaattcaatcctaagcaaggatactccaggacgtacctcgttcaacacattggtcgccagagtggcagtgtctcttttctgtagcggcttaggtattttagagccatagagatccatgccgatgacagcaggtacgtcgcgcacaggaaatgtgtgggcactggcactggcccagttggaccataccaatagagctgtaatgagtgactggcgcattgtagagtgctaaatgttgataccaatatttcaatattgtttcttatactccgtacagaaaaggacataataaagggcagagtcagcagacaataaaccgccccaactccaaggcgttacttggcaaggcgtttcttagcttgaaaagtactatgtatggagtactttataagacattattgccttggcatttgttaacaccaattgcgagttgtgctttagccccggtggcggaaacagttccccgtgagtggacatgccaaggcagatggaaattacagggctagccctggcccccagggagttgatataacatgactaatattttaaaagggggctgtacaaaaacacatgctaaatcttgtgtattgactagataaaacatcttctcaaaggccttgaaagaagaatatatactctttatacaggtctttattgcgtactccactgagccctcggttattgtatcctgtcactataaataggcggagaagtacttaataatgatgaaaggtccaccattgccctagctggcccttgcacatgaatcctgaatgttgtcggcgtgggccgtattgtaatgtagggtccaatcaatggtgttcaactctctgtattgctgtatcgactttcctagcaatttatatgggccgtcgattactaatctaaaattacaaaacgcataggatcaatggatcctccggtatgccggtatgccaatgcatctactccgacagattagcagtatgtctccttaaaaaccaaagctgtaccctgcgaaaaaaaatgaataaaagttcatgccaaggctcatagtcattctgatatcatcacaccaaccattcaagcctcgacttgcaaagttccttagttccaaaggcttttcgccgattgaagtgggtcaatttggtcacaagccaccctgagtctaaagaactgcatcgacaaggtgattattggctgaccgcgaaattaagtgtgtggactgacgcgggggcctgttaccccacggagaaccaaacaactgagcctcagtctgtaaatcccccctaagcagcattaaaagctctgagtaacatttccctaagggagaatcattggctactgcttcatagcgatcattcccgtccttatatgtatagtcattgttacttcgaagctaaaagctccccgacgagttcgctgcgaatcctcccgctcagatttgattaacaggagccctagtactccggcctcctatcgaagaagccgaagaaagacactatcgagaacagatttggatgaaatacccatttacagaactggggacttccccggcagcagaaaacgtggcggtactcctgacgtggaaagaggcatcacctgccagcagactagcagctctccagacctcgctgatcaaaatctcacattatcgagactggatagctcggtaagtggatccaagattaagaatgagggcgccaattccggctacacccctttaccggctaagcctttactacaccacaacactggatgacggtaaggccacttccggccttctcctcgccatgccaaagactaccctggatgcaattttggcctcatgattaactatgacagggctaatattgtatctgggtaaatttaatgctcgccatttgaaaattaactaagaatacgatgccaaaattccaggtcccttgctatttcgacccgttgtcatagctctttcaaaaattcagacgcgagggagacccacacgttcctgggatcatatccgaccccagggtccacaacatggttcccaggcacgctctttcttggtcgctccaagggatcagactcgtatttcccagaggacctaagttacagccattgccccactcaagaacccattagcctttattttcggtatcctctttcttagaacaaagggaagatagagagggaggggacaagtcaaggtagggattaaccttttgtgaggtcacctgtgcgtcaaccttggcggtggtctgttttggtctaaatgctctccgaaagatgccaaaacagggatatttcaggcttggcattccactgatgtataagtttcatggtagttcccaatgaaagtcccggtatacggcaatccactagcaacatgtacaacggggagcagtacccgcggacgtatcgggtcttttccacgaaattgaattgatcgtcatgctactcggtaggttatccaggccctctgcgcccgccagggaaggtgagcgcggagacaatatagattagatacgtgtggagcaagacaaaccgaccccgatgctattcaaacctctctagagactcaaggtgtggttccgttgctctcggcgaattccagacgatgtgtcgagccagaggacgctactgcagacaggatccggccaagtgctgtgctcccggagtccttcgatggggtaacgagtcagccaaggactggtttccttggaatacccagagagaacacttcccgccgtggcagccgcgtcgtggatgccgccaatgtccggagttgtccctccattttatgcggacaaatcaataaaatgctagaaaagtcacgtgtgcattttttaaaagaccggtaatcaatgtaatttcttgacacaccactccatgtcatcgtgtccttttcgggaagtatccaccgaagcgtatctgccccagcaagagctggtttggtgagccatccaaatagggctcgactgcaactggcatcttatttgcaccctgcaaacattgaaaagcgccggcacctatctgatcaacaaaacctcgaaccacattcacggcctacttaatcatgacctttgccgggatcttcagaggtttctcctctaatggcatttattctcgttcttatatgtgttttagctggaagctaccgacattttttggctacagcagacatcgtgacagtatgtaattgagcctcgtttacttgactatagctgctaaagatgcttccagatacacctccctagtccgcccggtggcaatatgccccagctcctttctattcacgtcatgtctatctgtcgaggaagcaagaacgatatcaccggctgttcttttctcagagttcctgttcatttcctcccgatcccggtttcggcgaatatgcaaggcgttccatcggtcaaacatgagatcgcctggcctgaatatgttatggatcggttagctacattagctcaaacgagccgactaatgtcaattttttacctcattgcgaccggtgcctcggggctatctagtagttactggataagctcttttcggcgaggaaatttgagctggcatgtacacacggctccggcgcagactcttgccagtcatcctgacatgcctccatcattggtggaatttttaagccttgtagtaagtcaaaggccttgttgctataagggaagccactctgaccttcgtttcattgcagatgagtacgttctgtatgtgctttgcgtcgactattgcatcgatcatttcggaggaatttgtatatctgatcaacactgatggcaatccttacggggtttgggctagccatggcaattctttcttaaagttgtcttgggcagccacgactctccaatttttggtagttgttgaatcgttcatcttaatcctcaaacgcagaattggttgttttctgtgcgataagactagttcttcactagtggataaatgtggcaactgatcgccctcgatttacctctagcgatttgatgacgggccgcggtatacagtccacaatagccatatgttctcaataagctgacttcttattaagctcccaagtgcgcggtgtatattactgtttgctaatgaatggcctataatttccatgggcttatctcttctacaaagttgaatccttggcctccttttcggttttgccgtggagtttgggatgttaatcatcagccctgcgttgctgatcatgagcggtcacatagttcgtctcgttctcctctactcccatactctctcgcgggttatgtgaaatttctccaggctgggaatattgaagggttgtcttggcgtcaacaagtggcccaaggaggcgtcaataccaatgctctttagcgcagtcatatttgagtcttccatgtccaatctgaatggaccaaaacaactttcacgctctgatatacggcatcatgtgttatcttgacatacgttgcctcagaaataccccaatctaatactatgaacggttctaagctttcggtatgatagaaccaacagttgaatagagatttcgattggagtccttatgttctgaactgttcactccctggtgactacgctgactggataatcgaggactatggtttcctgtttgatgctttcccatcatataccctagtacagaatgttttgcgcggcatctgtgaagagcagcaagtcattatggaatggccacccggacaagtctgcttcgtgttccattttcacaactttgcctaggctgagaacaatgagcttgtacttttactaactatagaagaggaagaatggataaggtctatactggcttgggttataacaatggaagaagttggttgatgccattccaatgttatccggaatgctattctggtcacgcggggcctacatccaacggaatgccttttcgggtcccccttcccgagcagcctccttaagaatccggcggcagtttaattgcaaagtatctactgtcattacccgacacttgcaataacagtttgcagtcgcgtgtacttcaatgtaagtctcgtttctagcaatggacgcaataagtgccatagcccggtcatacgtagtatggcgggtggcctctatataacacccgcacctagtaaaccgagggaagtcatcctgctcggaagtcctacataacggaccagaaggcccatgtaaggtaaaaggcgagcagcattttctgtggccatttaatgcaatacagagagagcttgcgattatcttcaacgtagccggaggtcgctggttagatacatccgacattggctcctccgttcgggcttcatattctcctcggctgcttccccaatctcgcgcgacggctatttagtcttccaccatgcacgtcgcgacgttgacccattagagagataaagatcagccaaaattgactgaatgaagaacccctaccggaaaggataatctttacccggatacccaaacctacatagctatacgcggaaaggatcttgaattatgttgaatgtaactttaggtagacatagcaagccgctgtatgttgttcaccgctgcttggcgacttcctagcccccacccctcggggaccagctccatacttgtgcacttggcatagaacgctcccttgtgagctcgcgctttactctctcctccttctatgctttgaaagaacccagcgggcaaggggtgggtgagcgatcagggatgtctcttcctatttggcctttccactgatcgtgcagtttctcctgcttatcccaatgctcagggatcctttgctctgcgtggctgggtgagtttaaccagatctccctgcgtcaacaagacacctcgcaggataggtccgcgtgaacaaatatcctcgcaggcaagagctgtgcaaccaaggacttcagagcttccgtgactacgactgtcgctgccacgagcccagtgacgtaagacctgcgctccctcacagccaatgaggccctgtgcatgtaaaaacgcgctcatccatgcaagacttggctcgtcaaggacttgttatggctctccagcaacgtgcagtcacctatccgtggtgctgggggccagtattcgagtactcaaaagtattcgaaggaaagacctgtgcgacatctccgtcatctggttcatatttcgaattattgccattggatacataaagtgagccctagatagatattcacaaatgtcatcacccaaagtaagatccaaactggactttcttcgttagcaactgccgtattctcagcctctgccttgatattctgctacctggtaaagtccctttgccccggcgttatacggtacctgccagcaaattttagagcaaatttatactaagtattgatgtgtgtcaatgtcagtgttgtgatgagggttgtggtgaatgttcgggcaatgaaggaggtgctcaacgtctatcccacggggactgatagggacaccaaagttgaggtgtaactttggtgtccctatcagtccccctatcccaccctcagattatgtaagtttcctgaatagggggttcaacttgaacttctagaaatttatcgagcgatatccttccacagctctggaaggtacaggcatcaatattgtgggaccacaaaagagcagttcaagctctttgtaatggtgttggttcaaccttggaagcgagcgatcttcgagcccactctgtcgatgagcttgaaccttgataaagtctccatgcggtagagcgttcatgggcaggaagaatgacatttaatttccgctatctattgccttatctcctaaagattagcgatggccttggaggcgcatacaaccaatggtgaattttagttgggtttggtgacgggggtcaacagtgcacggctgttgatacatccaacgcattcgataatttagcatctggctataaatcccgcctggttgacctgattttgtgtaataaaacgggaataaaatcactgctcagccgccagctttccatccctcccaacccacgttaaatcgctgctttacacacttccacattctctttcatccctcccagcccacattaaatcgctgctttacacacttccatattctccctgttgtgatatgaggctggtacagatcaggaagcaagccgctccgtcggaattagctccgaagtgcctatacagacgaccaagttgatttccaatcaacttggctcattgttgtatatataggctcatgtatacctctgaaataacaagtcaattcatacctccgaactacaacactccctacagcgttcgacggccagtcatatagcagaaatgaacgaactgaacaacaatggtctgtacccgttgcctacgcgggcatgtactgcggaagaggaagataaaaagcctagtttatactttctaaaacttatataattatactctccctacatgatgacagatatcagctcaacaataatatcttctccagctgattacatgcaaaccacgcgttgaccctagacccttatacatttactttttcatcatgtcctgcaaacctgctgatctacaatgggtattgggccaagtattgggtgaacccttgcaccgtgagcggtgcatatgggtaggagatgacgggaatcattgtcaaaacactgtgccgcttgactccaggataattggagtattgtgctttgcgctgctccaggcccctccgttcgcgtatcaactagcgcagtaattttcgttggctgcatagcagttactttgctttgagtgcagacgccatcgctgtcggcggaaattgtgggccacccggattttgcagttgttggatggtcgccaagatcaatccaaagatgtctcgatgcactcaaaaccattcacggttaccaggttacagcatacgcctcttaccatagcaaactctacgtgtaatgacacttgaaatgcttgtgatacccattgcgaagccagttttatcaaagttgtagatatccgcatatagaataccatattactcaataacttgctggacggcggcgacccattgctgaattacaactggatctccacattgcgcctttgtggtctgattgacgcgagaaattattagggagctcggaatagcgctttacatagttcttcgcccaatacttgccggccatttgatagggtgttcaccgcgcgcgctacgcgagtatattaatcggccgtttctcgcgcaagagtggttggcaccaatttcacgatgatccatagaagttaataatctttatagcaaatcttttcactgattgtgttaattcatgatttgcgcgtgcagcaagacgattgatgggtttgtcctggaagccggcgctggagggtagtttcggaccaccaaatcgttctgcccttcctcgaatggcgggaatttcgggggctgttgtttatcattacattattatttttaatattattatttgtatgcttgtatagcacgtgggatcccctcttgacccggccaacgaggtctccaaatggtgcgttctggtggtagatgaattgtagtgaaaatgtgtggaggaacacgtggtcgcggatgggcgacccactcagttgtctgatccactccctgtccattacgttacaccttcagttgactctcggcaggcgggcgctggcgactattcagggtttatcgggtgacacgtctcttttgcatcatctccagtcacatcagtccatgttctaatccacagcctggtagttcaagatgatgtcacccctcagaatacccaatatatctcgaaataggcgtgatcagtgcaggaggcgggtcaaatgtgataagcaggatctcccgtgcttaaattgcatgtcgcccgaattagattgtacttacttgaagggtatggtatgcaatgctgcttcttcacgccctcaaagccatacagttcccatttcctactcgaagtctggctcctctccatggcagggtggtgtcaactcgccagagtcaaaacattcccgttctaggcaagtgaatgatatggaattgatccacaaatactctacggagacataccgaagcctttccgccaatgattcggagaattctatttagcaaatcactgttccatctctcgcacttcaatataaatatttaataaatggcatcctggccctggctttaatgtatatagccacgtcttcagagacctgcgaagcttcggtttatcttaacacgggcctcaagtactacgaccagagtttagcactatttcgggacgaactcaatgatataacgccacaaaattgcaacgccattttcgcaaattctatcgtcacggtcgccgtcaccgttacttcgtcactactgatggacacgaatagagaacactcaagcaaaacagataatgcagtgatcctcgttaggttgttgcagggtgtgaaaatggttcttcaaactagtcggccatagatcaatctagagctctttcctcataacgaatgctgggataatgccgtcgctaagctagacgtcgacacatctacagcacttgcacatttagccacattaaatgataagatcatgattagtatttttgctgagcaatatcgcaccaataagaaactcatctcccatctccggcattattatgccgaattcgcacgctctgctagacttagcccagtcctggcatagcttactgcagtggaagaagattttatgaaaagcctgagatatcgagagcctttttcgctactcattctcatatactggggcgtgcttttaggcgagttagacgagcaacgatagtaggctcgcgattcgggaagagccttagtatctgagttactagaagccttatcatctgataatccaagcctggagcatacattcacttagatccggcgcaagatgtcgctttaaggagtatcaatatttggggcttatattgatagttaattttttaggtcaggaatacattacagtatcgtctctgcaagttaaatgggccactccgcatatagattacagtaggagaattttcgaagagaaaggtataaagacccattacagagaacaatccctcataagaacgcgtagccatatacagtaatctacattagcaggagatgatcgagcgtcgaaagttaaatcaacttttcattagttcactgaatatacgattgttctcaggccagagggataatggtggatattccagcaggctcagcatgacttttcttagtctatgtacagctctttagtacgaagtctggactaatattctatgactaaaacggaccattccaccataccttccccaattgactggtcagcaaagagacagtgccgaagatctcttagtctataaataccgacacaatgttgcaaacctaccagaaaatttgcagatggcacgcacagtcatcgaactcgaggtctgccagaccctcttctagagaacgaaagcagaatatatgatacttgatggattctagtgctcatacccgatacgctcacggcaaagtctccgaaacccccatactacattgtataccctcgctaaattggccctcgagcttctcgattggtaatccttgtctatgggaatgctacatcctcaaagctgccaagagacgaggcgaggatgagcaccgacagctttaaaagttatataagcggctagcaagcgacagcgacatccttctgcagccctgtggtagtttgataattaggtactggtattttgggatcaagagcgagcagttcaggccgtttgtgacggtgtggtttcagcttttcaagcgagcgatattcaagcctacccattgatggaccttgctgaggtctcggctttattggacgtccgtgttagagcgatatttgatcaagtccgctatcgcgttctctcccaaatatcatcactgattagaggcccatgcaaccgccggtgaagtttgttcgatctggtgatgggatatcaacggttcacggattttgatacatgtacacccaacctttgattttagaggacttagcagccggctataatctttccttatttgtcctggtctttcgaggatgaataaaacccctactcgatggcgcgaatataaaggagcaagactcccaggagcacacagccctacaggtggccgcgagatgtggccaggaaacagccatagctgactttctgaacggggaagccaacgcgcatgccctaggccactcaccacagtatatttcaccgtcgatgatggggtgcccctacaagcgtgaggacataaagatgtattgtgatatgagacagggtgcagatcaaaaccaagccggactatcggacccaagttatctatacgaagaatcaagttgattgtgttgcgatatggggctggtgcagatcaagaaccaagccgcgccgtcggaattaatcccgagttatctatacgaagaatcaagttgatttccaatcaacttgaccttctcgttgtatatatagcctcatgtttccctctataatgatacctccataatgaaacaatcaattcatacctctgaactacaacaatattcaatccgcaatgacaggcccatagttcttgttctgattgctcctctcactttttacaacccctcgatatcggctgttttgcggtgttaaagcattcgtacggccagctggttgaattgaaaatgcgggttgggatgaattatgttgatgaacttgatttcctcgaagcgtaaccctcgcacgaattgagccttataaatcggagtctatcaaaaatagctaaatagcctcggacgacctggtttagtccctttttcacaggagatagtgatttcaaagcttgattttcagcctcgaaccctaaaaccccctccgagccggggtagccattgggacccaaaaacgccttcgaactatatccagctacaaaagcaagattcgccaactaaggaattgcttcgtacgagatcaagaagcccccgagcccgttgagtagcgcgataaaccaggttttaaagacctgccaaatcactatgcaatctacggctttgcttgagaaagaagtgagcgagttgcgcgccgcttgcgagaagcagaagcaaaagcgtacttgatcccagaggcagatacctgccgaagagggcctctcagttcaagaagcatctgcattgattatgcacccagaggaagcaattgaagcacctctctccggtcccggcatttacggagaatcgggtttacagccgcgtacaaaacccctcaagggcgtggaatctgtaggaagccaggaaatagaagagagacgtgtccaaatatataacgagtttacttcgttcaatttaacgccgttgtggttgagataaatgcatttcaatgggctggtggggttcgcagctcggccgggaaatacgttattagggtcggattgcaagatgaaacaaatcttgccccccagtcaattttcgtagccaaaaatgcctttttgatcctatcggttttgtgcaaggagtgccattggctgtgatgtgtgaaggtcaagcgatgaaactacgactggggtattgctatgtcacctttgccgattttcatttgaccttggggattgattgtcttcttgtggcaaataatcttcggatttagaggcttacatcaatttatcgtaggctagtaggctgagctagatctcttcaagtcccattgctgactccactctccaagggaccagtcctaagtctcatcattatgtatacctaaactcttgaatgggttatagaccgaccattttagtacattggcagtctccagcccagccaaaacctcttggcggaactgaagccatgggacttgaagaggtctacatagtatcgatactgtctcacgacgtacagtatgaaaaccagtgtagctcgttagtcagcaagcattgctaatcgactctgggaatcaacgggttaatcccggaaacgccaaaagcaattctagggctttttatttcctgggaacttctctctagctcctggggccactttctgtttctgtcaggatatacatgaagcatacggaacggatggagatatgatctacgcgggacccacatggtgtatatgggttcccctgaacgcgaggaagcctgttccttttgcttcctcgcgctacgtcttgtatagagtcaactatagttgttcttaatattgattattcaacttgaaacactatccacctctatgtatatgtgagaccctcacggtttctaggaactgaggtctacccctgggatcttcactctacattccttacggaatatgaactggctatgggaatacattggctggctcgtcgtgggcttcagatatcgatcaactatatagaggatagcgggcctctcccttctagagccgagaagagaggaaggtcttcagtgacaacacgaatgctcgctggccgagacgctcagattgacgcagagcagatctctggttatcctcccgtctggtgcgatgtgtaatatgtcatgcggtgtcctgggcctccatgtcgcaacgaaggacaatattgctggcaataagcaggggggaacaggcatcatagattaagaatacaccctcgtcaaatatgtggagcaaggtcgagttctcgcgacccacgaggacgttcctgatagtcttcgccagcagctctatgctgcggagaaccagcaaccggaccaaaaaaaaacgaaagctgcggataactctacaatgggttcaatgtgtcctccaatcagtatctatgtcctcccggcagtatcatcccaactatcactatcgatacgcacccctgctaatgatgacatgcccactaggcccgactgtactggatcaaccatggtagacggcctgctaggtgtcactgtggaggaatataccgaatggcaacaacggcggtgaacaacgagactttcagggagaacatcaagaaagcacgcgatgtaacccttgtaaattgtttcgacctcatgcagatttatgagggtcaaggccgaggctttttgtcaaacagggcgtgaaagtaggtgctacccggctgttggtgatgtatgtctacgacatgtgcgacctacagtactggggtatggagtaaggggccgagaggtttattctttcacctgctggtttgtgataatcctgggtttgcactgatcctcactctaccctatgaagaccttgttgtgaggtgtcattgtcatactttagttgtaggtagtgtgtggagttatgcctaaacgcttagatggttctaagtttcttaaaatacattgtagataaaggcattcctttattcagtcaaaactcatcattacgctctccatgcttctttctcttcggttgtgtcacgtattgctatgtacgtgtccgtggattatctcgcgtcggtggtctggatgtgctgggctagatacaccgcgattatgtgtagtagtgtggagtttcacaataagtccccacgaggaaccggtatatgttttagatactccgtttaagcgtcatgccccggtagtgttgtccaatgtaatatcctgtgcatgggaatcccggagggagagaggggccgtggagctggtacaaccatgacgttgtgtgggatgaagtgcagcatggccgtaagggcgcacggtgaagttgccggggttggtcggggtaataagcaatagggctggggtgtgttgtagaagtgctcaggattcgagacgagcgttgcagcacaggggttttcagggctgtgtccgaggaaaggtcgtttgggtgagacatagctgagaccggcaccaggattgaatcgcgaaggaggataacggccgtcgagcggatatcgttgttgctttggagctgaggcatcccccttctcgtgcactcatacttgaagcagcacaaatgcaagatacatagaaattcagatgccatgcatagatcaccaatctagaacgcggaggagccatactaaggacgcccttgctatgagtcttcctcccctgggccatgtttagaaaggaggtgaggatgggaaccgagcaaaccatataatatgtacagtgcggtggtggcagcatgcgattttaccattggctccttacctattttcatggtcaggaggctccaaatgaagcgtggaacgaaattcgccgtgccggcaattttgggacttgcttatatgttcgtatgctccgtttcccctttcatcctagagcttatgctgacaatgagcagagctagcgtggctgtcatagtccgtatcccatttttgcattacgcaggcagaccagacttcctttgtgagttgattcacatcgtccacatacgtcttttcgtctagtatagtagacgaaacaacacatatttcgatatggtcgaatgtagaacccagtttagggatcgctgccggtagcctaatgacgcttcgacctttgcttcgagttttatcaaaatcaggttcatcagtaacgaaccaacacagactcgttacttcttttccgatgctgagtagttgttctgatggtgaggaccttgaatcgccttgcgaataccaaacccactcttataattgcggtcattttgcaaattaatggagtcaacttcttggcttgcaatgtaggagatggaggggaaggtttgccacattcgtacagtaaaacaggtacactagcaccttcattaaccagctacttatggtgatctccctgttgtaacatattgaacaatgaaaatatttgcagtgataaatcgatttttgctggagctggggggttatctgcatggcctgggcatttccttgacgacggggcttgtcttatacttgtcccaaaattaaatagtatgtgtcactggttagcccttgggaaccagtaagacatgcatggagcactcggatggaggctagatataattgacctcggtggtttgatggtcacgctgatctggtttggatcatcaataaaacggtggggtaatatctaaaccgcccatagaaggcggttaccggtgcatcgatgaagatgtaacgagttaatattactttatcaattataaacaccgggcgaaagagccactgaccatgcggaaatcaagaaagccgcaaatataaacacaagaacggtttagattacgtgttcttcttgatcaggaattatcagacaaagtcagttatcattcacttttgaaaacttcgttagattacggtctttatcaattgcattactactctaaactatcaccgtccaaacccggacagaactgttacgggcagaatgcacaaaatagtttgccgaaagataggggataaataatgtcttgtcagaacttctctagccactttacacatctcaagttgggccttgacctattagttccacgcaatcactatagtgcgctcaactagttgctgtctacccctttgctaatcttttaaattgccatcaaacatcgttgttagatcggtggaggaaatgtgcagtgaaaataggaaatataatgaagaggcaacctcctgcaacatcatctactctatcagactaatggaagataaacaggtcgcgcttgtgtgtacatatgttgcattatattaagcaattcaatttattatacaccggcaacaagagcagttcgtttcgcagagaaagctatgatttcatatccgatcgaagatttggagcacgcaaagcggttcgaaccacatggccccggcggctgttgccctaagaaaaggctcaacgctcatttgaccacttgctcgatggattgagatatttttggcatctctcaaacactttctcttgggcgctttcttttgatcactttgtaccgaggcccatgttgaaaagcattatcgcgaggcgaaagacgcgaagggctatagctcatctcctgcttcggtcctatagagctaggctgaccgcgactgaaggattcatgatgaaagtcgccaccggatttacgaaatccatagtaataaagccgcctaacaagagattggtggcttttagtggacaacttttgaagtatatgcgtaggaaatctgctttccggggcaacgaagacagattgcccatcttctgaccaacgcattactgcctcattttttggatcatcaaggattctttcatatattagtacacagggtaacagtattgatgatccaatgaatgcttcacttactcgctcagatcctgaatgaagtcggatgcatgaagcctgggttctggccttgcatcgctctcagggcatgagtcagctcgttgcaagtcatccctcgcaatagcaacttctggtggagctgaatcattcagctcttcattgactggctgaactgaccggtcattgctagcattctggacagtcaaataggggcttgatgaatcttggtaaccggagctttcttgttctgtcgaggaaacaggaccaaaaccaccttgatttggaagagcggattgagcaccatccagcggtagagctcctctgttattgacgtggtccttgtttccagaaagctgagagactaagtcctgatgattccggagatgttgctcaacaagcgaaatttgttcctggactacattgatcggcttaagcttcctgtactgcaccacgggacaaaaatttcagagactcaccttcgcttattactctccgagcatcaacaagctcttgcaataccgtgtcgtttgattgaagttccttctggcaatcatctttatctggccaagggaagagaaaccgccaaggcctacccgagcgtaagagcctgaggtcattctctgataactcaacgctagaggttccgaccctaagctgtgctgggccctcaaactggggacctgcaaacagaacaacgctggtccaagtcaacggtggcccttcccttacggacggtattgtaatcgagaaaaggctctctagactcttgctgaggctgttgctagtcaaaacctctccgcggccaaaggcaatactgccaccttcatttaaaaccgacaaatgattggacaattcggtcgaaaattcggaaatggaggtatcggcaagcctaagaggtcttagacttttattatgatattgagagacaaagttgttaactattttatcaatagtttggcaagttctatcgccgggcacttcgttgaaaggagtggtcatcatttcagagcacaggtttgagcacaccctggactccaggaggcagaacagcagaacatcaatggcggtaaggtgcttgccgaggcgggttaaagttactccgtgttactaattgctagtcacagccactcgacgcacgtcccacatatagttacatactttgagcatttttttaaagccgccattctttagccaatttatttatttcggtttggtttctttctaatcttgttcgcctatcacataccacatttccacttttgagattcctacttgtacgcataatacgtatccattggttaccaattacaaagatatattcttgggcaaggaggatcgaatgagtcatgccagtttctacgacattgaattttacctcctagtaataacgtttcctgctgccaccattgtcgcgaaagacgagaaagttggaaataagaataagaaaagactgctacgtcgattttatggtgacggtgctggcaggaaaagatgattgtgagtacagtagtctgcctcaaattctttttgcacctgttgaataccaccgaaatacccgaaccactcaagagacaatattctataaatgtgtattttgactactagtattaatgatacgttctagccgtgttgtttatacaccataaactgccctcttagcgtcatcacgctttctcatgcccttgcttacaaaaagaatgcctattacatatgccgacttgaccgcaagatgtgtaccgtcaccaggtagttaatgaatcaaagctgttattgttgtctcatctttgtccaacggttatagaggagttagagagatatattaatacgcataggcgaagatcagtgataagggaatgcacggcgagtcgccactagccagccacctcacattgtaccgtttctgaccatctttggccacttagcgtctgctcagccagacactgttcccgaagctcttacctgctatccatttttaagggacatggccagctgcgccagacgaccacggccatcgtcaacatggaagtcacaggccccagcgcgcccggcctggaagatagtgattaactatagttcagcaacaggggcgtacctctccagctgaccgaacaaaatacccgcgcgacacatcatcacgaagtttggttaacctcaccctcagccaatcgttaatgaggcatgcaaatgatcatgagtgagcgcacggagtcaaaacgttcgaagaggcaggttcgacgagtgggtcacaaaagcttgcccttgatctccaggctgttccatttcccaggctattttatggcacgataagcagatccgttcgtagaatagagagcttcaccataggatcaagggagctatgggtatgatagagctctcgcatgcaaggctagaaactccaagcaaagtcacatcagcttggagcaattgaatctagactgtcaaccgtagttagaccatcccttctctctctaccgagatcagccccagccccgtccgcagcacacataccattatgcccaatctcgagggtgtctatgaatcgcccacccattcacttaaccagcagagtgcctgcagagtcattgccagcgctgatgagatattcgaaatgtttcggaccggctcttaagaagccgacacatagtcctgatcacatggccccgatcccagtcggcagtccttgccgtgcagcaaggtattagacaggcgatgtgagcctcgcagagcgcacgcaacaggcacagcagtccggaccctacacgtggaacctcaattaccaaatgtgtatactgcctgaccaagacttatctataccttgtatcctcatccacaatcacgggatgtgacgtaaactggacagaaccatactgaacttcgtatttgatagggtgatttgatgcaacgaacgacccgacagacgctgactgggccaccataccaccgtgtctactcgctggcatatatttaccacgcagaagaactgcctgtgtggcttaaacatcctccactaaattttcttcaagcccatccagcttgtgtggattctataccgcggtcgcccatatggcactggcttgctaaatcacttaatgtctatctttacgaaagccaatatactcctttcagatgcggcctatctgtgaattggccatatgaagccctcgactatatactgtcagacgaggactcagccggaaaatcaaacgacgtactcgtaaaatctgccctttgcatataaagaatatctctaactggtcactaattccgttatttgcggagagctagtcgtggctgatagatgtcgcacgacaatcaatagtaggtgacttactggcccaattacattgttgacatggtcgtagcccagctgttggggtattgccgtttaatctacctatattctttgtccgagtgtctggacctcgctgaacttggtctccgtgaaacctaatatggcattgcgattatcaaacaacgtgaatatctttgatcttggcgaacgttttccgtattggctctgctcatctgaacgtggttcatgtcgaatcggtttgtagaaaatcggatggagggctacaaggttgtggttgggggatttgtaggtcagttagcacgaaaaagaacagccctagagagaacaaatttcaactgtattcaaaagtctatcccgttgcttctcgtgcttgatagcaggaaagttgacaattcagcgccatcgtacatctcgatcgccaggatcaattttgaccagagtaatctagtggccatccctccggcgttagctgcccacagaattcagggttatagacagatgctgtcttatccagggtagccacatagcgattgcggcccttgcgtttcccatacgttgcatagtgtgctttaaggttgtcgcgacgcaagaagctgcgttaacacccaggtacctagcagaaatgaggcctctcccctgaatggctttccaggtgacgattaagggtctttcgaagtttgaaataactcctgtatccctgaatgccgcatttgaactgccgtcgagtgacgttggtctgggaacctccgaggctcaaattggacggatcctacgaggtatatagaagattgacaggctgcccgaaggcttagcggggttcagcaacatcattttggctatcgtgctatagtgcctcgagtggccgtgggtagggagaattgatattcgcttggtttgggaaaaggcaagttccaaagaaactcggcacatagtcaaaattctcaggaggtggccctagcaggaggtggttagatagcactgacgtaggcagatattcgagctaacagatcataggccgtgatccgcaatagatcgaacctagatcaatcgagcagcctggttgcccgtaatagtggctatcacagctgccttcgtgcttttgcactaagtggggcgacgcctgataaataactaggcccccatggttttaatgaaattccataccaggccactcggtagggctaggagcaatgtttgctttcaatttggcgctattatagaagagcgtttgtatgccatttgagaatgccagattatttctaccatatatttgcgaggatagtggtgtgatttgttgttctatctgtagacttctacccgtaaataacatatttgcagacatcttttgcagatagccgaaggaagtaataagcggtaaagtccgacacagcactatagatatattgtccagatgccacgcttaatctgtctgggtgcaagtatgggatgccgggtagaagtttttaaaaagttatgactagctaggagaaagtcgactcagtagtagcaacccttatgacctttggaatttccatagtatcaagcttttattcgagaggcgaaaagagtggccgagtaaattttcaccatcacacggatagcgttaaataacggagacttgctattttgcgttaggttacgccttgaatagatttgttacaatgatagggagttgacagataaaaagcccgctgattgaacggtggtcaaatacgtgcgaggtttactttaatacatagtgttgttaccgaccacaacctcaaacaaggcgtgataaatatgaacgccagggcctaacatttatacggactctcaacaaccttaatgaccatttcttcaactcccgtataccaaacctggctacccaaggataggtgatttaacacaacagttattagcaaaatggagataggggcgtccaacagctcgccaaagtctaagttaattggaaatcaacttagttctttgtatagactcctcaggatttattccgatggtgcggcttggttcctggcctgtaccagcctcatatcacaacactttccactgcgcacgtactccatgatagatatacccagaaagcacaataatacattcctcaaaaaggctgactggtgagaccacagtgaacctgaatggtagtccttgactgcccaagattgaggttaatatagcagacttcacggtgggaaatgaacgaggtgtccgataaagagtcctagtggtagttaatcactgcctcagttcgtcaagtaatcctattaagaagaccacgcatacagtttcccatcgtttaaacattcactttagtagaataacatacgttgctgcatcgattacgatcgactaaatcaaacaaatctaccatcctgagcctaagcctatacattgacagaaattttctttcctaggccatcagagcactagcctctgcttttggtaatatcttaaaatcgtgtaaacattgtgaaaaattcgagagattggttgctcaccttctttttacgaattttcgagccctattcaaagccagcacgtcttagtgtatagcctcaaatctcatagtatcggtgctaatagaactgcggcacaggctgcttggcatttcccgaaagccaagttgcatgccattacggaggcaggtgcactagcacccatagtagctccccaggtaaagcctactgccgagtagcaagccataataacagcggcacatcctacttggcaaaccccgtaggcggctggtccggcagatacaggagggatgaaaagtaggagattattaataagcacccacgggactctcattttttaggacctaaaagaagttgaaactaggaaccccaaagtatttgtgctgtaccaagagtatgctaagacaagggagaccatactgcctaaatagatagacattcaatgatacgtcgccaaacggtggctactctctaggcctcatgaaattttgcgttccgccgtttcctagaaaaaaaggcaaacggaatccttacgtttagaaatgcagacatacctcggatgtatcaaatgcaaggcgtacgcaagggatcaacacaccaattacattgccattttccacatgcagagagccgatttgtagtcagcatttcctgtcaccgaccgataggccatgaatgagtgagccaacgataccccggacttaaaaccagttatccacctcacagatccccacccaaagctcacgaaattctctcgatgtgggccgaatcagtattcgttcaatcccagaaccgaaaacataagtgatcatcctcgagagcagatatgcaagaacgacaagtctgtctgagtcacgaggaaatcgttcgacagagaccgtagaatcacgagcgcaaccgtctcggctggcctgatcgcccgcctgcatcagtttgcatcagtttggcctgttcatggcaaatattgaaacgcactggtgagaatacctgcacaaagtgaggcatgttatgacctctccttcaactaatttcatgctgagcgaaaattcgcttcagattctggtaaaccaaagagaaatactattcacggccgtactaggataggggtgtcaagttcatggaaacaccgtcgttgaaggaacgttgattgacagggaaatcttgcgcatatatatcgggcctcagcaagaactactctgtcaaaaaaagagcctagggcttcaagtatttcaatccgggtttttcactatccaccgttgaccctcatttaaaaaaaaaaaaaaaaaaaggggagactacctgtagttaacgaaggtgatcatcgaagtgattggcattctccgttagctgccagcgccttcatgttactccccactgacggcgagcctggaagtccaagcacgtcccataattttgagttgcgggtcgagaatctggatcaacgtgcctctgcttgtgcgagatggaccctctcacctctggccggcgataaaaaacgtaaagctactcgctctacgctgagttggccagaataattcctgtaaatacatctgatgttctactaggccggctacctgtttcgtaagcgtataaagggatatactaaacttcaaaaagtaactttctgcgtcgatcagctagtactacagctgcaaatctatttttaaaccattccgagacgcgcttaggcttaggccacgaaaagaaggtcaaagcttaccaagtccatacgcgcctattcctccgttgatcgaacgtaggcatgtatgaacacagtaaaacagcccatgttataaggctatagaagatgaatgctctagcatataaagtggcataatcgcgtcttatttgcaaattcgatcgacgtgaagcgttcgatagctaccgtgactattaataatcaagagactcttcaattcaatatcaaaccaaatgatcctggtgatatatgatttgactgtcgaacatttgcgtgatccttggttgtgatgaattgcattatagaaggtacattggggctaacggaaggactggccacgtggacgtttataggggaacttgccatatctggcaactgaggggtatactcagagattattccgggatcttcttcgctaagactgttttctgttggctgctagacgcgttcggctgacttagtctgctcggtcagagatggtttgtctaatggaaaacggactttcagtaccagcggatcgcgcttggctggctgggctggctgggctggttttttcttagcttgcgtctaatagagagaccaaggcagcgagcctgaccagaaataaatgaaggacttcgtcccctgtggaatatctcctcgtattcttgcgctatccgcgaccaactcaagtgccccctggtactcaagaaagcgcgcaattgtctcttttctaaagggctccacgctgaagtcatctttaagggcggtatgtgactctcctctccggatgtgcttagcgccgcaagagtactgcccgtctccccatcccgacaatggtcggggtttggttctacatcaattctagttttagtataaactgcagaatctgtgtttacatccacatcacatatatggatttcgacgggggactccgaagattctgatctggtaaaatctctatcggcgctatgggtctgttcttacgaaatttggaggattgtctataccgtctcgttaactagtagactttagcctatagacccccccctttttttttgacaggggctatgtatcaccctcactttctgaaatgtcctctcgcaggcgagtcttaaatctttgatcaactcagttctagcttctcgctctgcttgcacatcttcgggttcaggaggcatcaggagcagcttctgtagcaagttggatgaaagtatatcacaatcgcttttgctcaagtctaataacaggccccgaatgcaaagtcgatactggtcctcgtcacgtagctcaatttgattattcaaattcgattctcagatgagatcaacccagctgagatgacctccgcgaaggctgtcgtcactagccaattccacgacccttgggcgagagctactgaataaaccgtttatcctgtcctctattttgttactaaagagaggcttgtagagctgcttggcgacactgccgtttcgatcaaggattccgatgtacagtctcatcagcttcagaattggctgtaaaccatggcgcaccgtctcaatccgcggcagcggactagatacccgatggccgaaaaagtcaatgggctcagtgggcatattactcataggacttgggattatactggcgttttgatggaccggttctaccgaagagaggagagcgacctttattcaatccattgccagagaccggatccctgccgacacaagagtagagaggactaattgaaaagaattactcgaaaccctcagtggtaatggaaaagggggaagggttgccgtcacacaaccaaaaccgcttagtaaacctgggtactttgttattaatgccccgctagaggagcatgattcgctgaggctcttgtttaataagagtgtggcatccgattggttgtgctagccaacacgatggattaaatcgaccagtgatcggagggctagaagcgccgttacgacactaggagcgggcggcggaaatatcgagcagaaaattctttattagtaaccgaacacagtcaagagatctcgacggatccacacatttggcccttttccgccttactttttcgtaaatgtcatatggcttaacctaccagtttcatacaaagctttaagtgaaggtttaccaaagagatctggacgagcaaaaaatgaagattgtagtagatttctatgtataattcatattgatctgttgtttatggcccgggccagggatcgggcacggtccgcgcgcggtggaaacccccggaatgtttacccctgatattaggaccttcccctcttttgtgtcccatcgtacacttcttgggctagggatgtgatgatagcaattcagcacaaattgcaaagtattgctgagtgacctgaatgaccaaataatgattccggtgcgcagaccaagaatgtaaggcgttttaaggagactttgaacgagcatgaggtctagtgaggggggcagctcttggttcaccaatctccatagtgtgacaaaccatccatggttccaaagtgggtttagagaccaacaaggaagggagatggtctagttaatcctcgccgtcttaggcgctgttggtgatcaaaacggtcgaaagctgccgagcgatcatatttaggctcggtaccaaaatttcaggaatcgtagaaacttagccaatcggaattgagaagctcctctaacatgcggacccgatatagtgtcataacgcaaggaagtaataccgcgaaaatgtatcaaacattgactaggattatcgagcgccgtccgctgccatgttacatttcaaaaaattgatttgcaaaactgcatcaaccttcgcttggtgatccgaccggaggagttgggggcatcattgctgatcgacgggaaactagccatcaatgaggtgggagtgattgaggctgtctgcttttctctccatcgatttgacgcaataaacgggatgtagtgggttcggagtatcattattcccttgttaggcgatctaacgctagaagatgcagatatcaacgcacaagcccgcaatatggatgggagattttgtcaagatgcaggatgatattatcttttttaccatgtaaacatgtgattttttactatgcatttgcttactaatagtgtctgaccagattgttaaattcaaaccattgttgcttttagttagagaattgtaccgttgtggattttacccgtacgttcgccatacacctgatttctgttggatttccatttaccgacccttgacggaggtggaagcaagaaccacgtttgtaaatgtggaggcctaataggctgccgctgcgacagggagtaagaagggtcaagaataccagttgttcctagatagttccatgtacgctcttgcaaactcagtagaacttgattcagatatgtcagtcatctgctcctaatgttgaagggttgtcttggtaaaaagaacccttgaaaagaggaggccgaaaatgctaggacatgaaatatgacaggttacttagagaagaatgatgttattgtaatttacagtgaatgtttgaatatgacacatagctgactcttgctcgcgggaaatgttcaacgggtgtgtaaccactttgggagcgcctcaggagtttggcatcttcgatcccatttaacgcgtatgttattgtttgccgatcaaaaccaaaccaaccgaccctattagatgtcatttagagacacaactacgcttccacaaatcattttatggcatcgccgaacgaccacgagagtcatttcgttagcaaacctcgcagaaatcaggcgtttgtctgttctggttgaaaaaaaaggatgccctgccagttcgcctgccgcttttctgaatctggataccagacaagcattctcttggcgagatccagaaacccttccttctcctctccctcaatgaagggagcacgtgtcgcgtagtttccggtcggggatcagatcttcgcaaagggttgacccagaatggttcgttagtctgggaatacttggatagaaaaacgcaggcttcggaaccaaaccaaacaaccttccgtccaaatgggtcaagaacaaaatttattgatagcatacagctccgtgagtgtccaaatgatttgttcccgctcgcttgttcatgtcgacagctcagcaacgcggagaggaagaggcatcaaggactctatcagatgtggttattgggtcttactacgctccttgaattttgagtcttgcattagtcaggcataccaacgtctgatctgatgaaccaaatcgactggagactggaagaaagggtcgagtcagccgacgtggtacccactagcgactcatcgaagcgaattgtagtcatgtggaatatagagagcatgcgaccgttagttgttggggggtgggggttgagaagacaagacatttgctcgcttcgcattctaggcacggaaatctgagggtgtcttcctgtggtgagatccgagttagcaagcgttggtccagctgtccgagatattggatttacgatgaagcatttcccgagtgtacggttggatcatcataataccagcttaccaactagatcattgccaatttgattctgcaaagcagtcaccattcatgtcatgttgcatccaggttcgccgcacttctcccactgtcgcttcgagaagccgtgctggatgcactggtcaagttcacaagacggcaaaggcgcgcgacgaacctacttgtgacaagaaactgtccagtctgattgggagaccgcttcgtgtggacagtgaggggctccgctgttcagtgtgtgaagatggtgagggaggggaaagacgcgatggcccgtcggccccttggtgttgtagttcagaggtatgatgattataatttcagagggaacatgaagctatatatacaacgagaagatcaagttgattttcagtcaacttgattcttcgtatagataattcgggattaattccgatggtgcggcttggttcctcatctgcaccagcctcatatcacaacacttggtcttgcctgactcggcaggaataggtcactcgcgacaggtgttttcgcgattggcggtgggctgctcctacaatggcgtagagatgtcagtgatgtttgtgtccggggcacagacttcgcagaaaatcaaaaccggcgcagcaggaggcgcgatattcccctcacctcatcgtggagaacgaacgtctggagcttatgcgtcctgtttttggccagcgaccttggtttgcagtatctcacataggacatgctgcatagtttgaagtgacagggtaagaatcggtgtgttaaccatgatcctgcgcggagcactaacggagtgccggttcggcctcactttggtgcgctgtcaacgatttccagtccatcgtcagcttgtcgatcgacgataaatgcatgattcacaagttctgaaaaggcgcgggaaagggctccatgactggtgtgtattggacagaattcacagacctggtggcttcgcatcgtctttgcagtcagtctagtcgcggaaagggtccagacaacttttgaacttatgaatagtgttgagatagataccttgttgttgcacttttattgttttccgtgctgtaaattttacaacatctacttttgggatttcttggcttttcaacgaatgtggaaaaagtgttgtgattgggatattatatcctttggacctttcaccagtaagccagtaaaaatgaggcacattcaccaaccggcagatgtatatacatactatagtggaaatacttaaattcggccggttccatgggctcacaggagttgttgctgtcctagcaaaagaacaagaatggtttgctatattcaagtgtatggcagacagcatggaattactacggaaactgcataccaacatattcaacttctagagcaggctatcaatcacaaatttgaggaaagtgctcattggcacgggaaatgctatcaccaggatcgcgtacgaccccacccatcctggctccgaagggatcttgtctatgcatgtgcaggggagaaggggaacaaccgcctgaacgaggtgtggtacaacacatggattttccgcatcaatctcaagattgacggcgatttggatgaacggaccgcacgcacgctgctagggttacacatgaaggtggagaggatccagtttacagaaaggagtcccaatgaaactacgaagcgtatgcgtgaattgagagacgagatcccatggttggcggatgggtcggtagagatgagaaacacgggggattgtcgattcttcggaaggcaatttgagattggaagggatatctgatggacgaaaacaggaaaggcggaaggaaatgctacacgtccgggaaaaatgattgttcatcacgtcacaatgttggatcccatgccacgtgatgtatatagatttataggagcgtctgcccaacaggcagacactccgctaggcagcagggagatgagctgctgcaattgcaaatagctgtatcctgtattcttctatttttctactaataacctcaattcacggcctcaactcaacgagcggtcaggtgaattgcacacacacagtaagaaatagatacataaaatatatactaaagagcgaaactttccatcaaggttagaaaaatatcaactaagcaatgcgcatgcaattgggtgacgatgtcagcgaaggtgctgtgcgcacgtatcacctatgcgagtccctcctgcctgcttttgacaacttccttcttcttcttgtagttcgcgtcgttgccattgataatccttttcccctccaagtcatccagaagatcaaggacgtagtcttgacagttataccccgggtattcgttgtggatcggcgcctgtctcgctgcctctttgattgaggtaaccttggcaataggcacatcgcacaggtaaatcagctcggaaagtgttgctgatttacgggcatcggaagctctcatttcgaagcggtaattggtcgacgaacccatgatgtggaggactgtctgttccgcatccgtgggtccgttaacaaagaggctccagtgtttgtagacacctccgtcattgtagatagcgacatggattcctgcagtcgaagacatttgtaaagtgtagacggctaccgtaagaactttgggacgtggtggatgggtcttcgagcgtaagaattgtaggatacggtaccgactgttggagagcaacagaaaatgcagcaacagtaaaagcacagaaccgggaggcaaggctgtatttggtaaaagtaagaaaaggccttggctaagagcgatccggtgccctgttcagacttaattgaaggagacggaatgaaatggttctgagattagggagaacgatggttgtacttatagaatacactgaagattagatactactatacatttgaaaattcacgataccgcttggcaaatgtcaagcagagcaactagccatccatacatgtatcatgttagaacactgtcgtccaatcaattagcgctaaggtgtctgtaagtgataccaatgtgcatgagataggcatcgaattctaaatttaggtcgaaggaagggtttcctagctgctgaaaccaaagagcgtcacgctattttcataaccatgtaagcgctcgccatgtgtgacttgaacgcactgacctgttcgtaaatagggacggattggcatctcacagcgaatcacaccaaactcgagagggacctgcattgattagcgccggcctcgacctccatcccaccaatacaagattcccattccctccgaccaccatagcgcctaaagctgcttatctattggaagtttcaaaaatgcggaattagatggataaataggggttagacaattctagctaataaaattgatctctagcagctggaatctaccttgcccaaggtttaagctatgtggaccggacgtggatcccccaaagtcggtcaacaagccaacgtatagaatatttagaaggcgagatgctctctggtaagtagagaaaccagtcgtcttcatccactagactcagggtgcgcgttagggtagtacactcatagtacgccggataaaagccgctgtcctcccaatcaatgatcccagtgacaatataatgaccattgatattccggtcctttgtcaccatgatattgtcaaccctaacatcaccatgggtgaacaccaatctatgtgccatatcaggactatcatggtgtaggagggatcgaaggagtgtgacgtatgtgttgctgccatggtgacgggccgaaaattgcaggttgctaaactccatggctgtagtgatacctttgaataaggcacattcgtcaacgcgaagctctttagccccttctccgcgaaccccgccgagcgcctttccctcgtcctgttgaagagacctcaatcgacagaaaatgtcttctagctgttgttggatcgataactttccctcatgtgacagaacaggccatgcttgagccagcgttgtgcccggaatataggacatgaaaataacccgaaaaggaccgaacgcgatcaagccgtagggtctcggagcaggtatatcgggcgcccgctcagcaaggaattccatgctcgtgtattcggtgtaatccctattccccaagatgactttggcaacaatgtcgtcgttgcacttaacaacaacgcctctaacagggttttcccacaacttgggcgaattccaaagaagttgtttcaaaggcacaaccaatgctttcccattgtcacttgacccgacttctaaagcatattctgaaaattgcgccagcagagcgaccacctccttagacaatggaaagatgaccgtggcagtctcggcaagatcaagccgtgtgcggaactcgggggcttgtacctcgggagcatctttctcgaccagtggcaataccttcggtccagtcgccatagtaatctttcgattataatttgtcgggaatttggacagcacgttgacctcgggttcgtccctgagtgtatcacggagctcatgcaaggttcggagattgatttccgcaggataagatagctgacgatattgggaattccgatgttcaagacgatatgagtcggagaacattgacatcaggtcagcctctggattcctttccagttctgcctgaaatgcaaggataagatctctgttccattgtgctgcgtccgcgttggagagggaaagagcttctgggtgaggagtatcacccatagttggtgtcgttgattgagacaagccagtaagcctaaagatattctcttgaataacttgagtgtggccaagagaggcgagctctagggacagatagggtggagccccgtgaaggtgggactcgcctaggctgcaataagctgatggcgcgcaggcgtgcttcacgtgaccattattgtcttacccaccccacacgtaggctaagctcctgggagtgaagagtgggtttaccaggaacttgcaactctttaacgtatcgaggaaagatgccaggaagagcgcggaatagatatataccgaagtattggtctacctgtgagtgttgtcgagttacagataatcaagcaaagactcagtaatacaaaacgcaaacacaagtaaacaatgtatgactgaggacggagaactaaactaggtacatgaacgcgtattcttatatatccctgagttcaccccttgtgatgagtagatagtagagtggtaaaatctccttggcagattctactgttcgaccatctacccttctacaacctgtaaggtcacgtggtcatgtagctccctaaaggggtaaccttagatgaaggtgacatccggtacagtgaagtacatatggctataaattcccctagcttgccctcattctgtgtaataagagatgaataaataactgctcggcatccagcttttcatccctcccagcccacattaaatcgctgctttacacacttccatattctccctgttgtgatatgaggctggtacagatcaggaagcaagccgctccgtcggaattagctccgaagtgcctatacagacgaccaagttgatttccaatcaacttggctcattgttgtatatataggctcatgtatacctctgaaataacaagtcaattcatacctccgaactacaacactccctacagcgttcgacggccagtcatatagcagaaatgaacgaactgaacaacaatggtctgtacccgttgccttgataatttcttgcgctaacattactagtctacgatttggatctcgtccttcacgctatctggcatgaatcttctggcataccgacaccgcctccctgtctcgctactgatcccaatgatctgtggcaggattcttttggcaaaggcgaccctgcagaatacgaaactcaagagccttccttgatcgaatgccttttctatcccagtctcgacagtctgtccgggttcaagtggacaggtccggatcctctgactaactctactcgggctagtgaggttttcctccacatgtcagcgctccttttccctaaagaggtgcaatggatagaatttcgatttgtgcgatttgtgcgggtgtctggtgagactataggagaggatatgttcttcctgccgcgggttgaaacagccctgggaaatctgcgtcggtctcgcagacagttgctagacacaatcgcctggcatactatccgtataacaggcactagctttcgactatccctttggcctcgtacggaatccctaccgtattcgagtctctcgacacattccctgttgactaggcttcccccgacgctacccctagacccacggtttttgtatataatatatcgagtaattaagggtgaggttaatctgaatcgagcgggattgttcgtatactcattttagtaaagactacgataatgaaaaatgactatttggtgcccttcttattaaaagtctcgggaatatataacctgctttgcatatggtgtaattccccttacactgtatcgccgcttgtagtatttcaaagttgctaatataggatagggtaagccgaaataggcaattccttactcttctcttgcgacgtccgtcaaccctaccaaattgggactgtaggggtagttccagtcatcgagtaggctagtcagtcgttcccgagatgattccagtacctacttaaaaaagcgcagtcgagctagctgcttgtcgtagcgaagctgaagtccgtccctctcttttcttatatacgtaccagcctcctttaagatcttattactctactcaatcttttggacatcgatgtgcttggaaacgtatgacttctataggcgtcgatagaatccgacgagacgggctgctgggaatgtaaacttgggatcgtcacgttcgaggtctgctagtacctttaagatgggttgaaaaggctcggtcgctaaagaatgtcttgttacttcttcgtattgcgaagtcgaggtctacgatggtcagccaaagaatttgaagccgaagggtttcacttaccaatggaaggacatgatcagaaggttccagattactgtccttattactaaggtttggtaattcatagggccgctgttctcctttttcctggtctggcgagctgttcgaggcatccattttgtccgcaggagaaagtcaaggtctgggcgatactagttccatcaggccttggtgtctcttatagaatatgcagccgcaggtaactatgtactgggttttacgatcaccatatagtcaattaacgcagttagcttttggatggaatctgtttttatttctagcgggcggttggcagtcaatttgatagaagtgatagtaatcaacgaatcggtcggggaaactgatcaagtatcacgatgttgagggccagatatgaaccctcattgagatatatatttcaatcagacacctcttccacttgcgttgaaagtcttagggactcggcaaacagcattgtagaccttagagtcaccaaaaaaagaagttcggaaagaaaagggaaaagaaaagaaaagaaaagaaaagtatcttcgaagattggtcacaaattcaaaaattgagtgttgacaacgtttggccaagcttcaacgggttgatgggttgagcaaccgcacatcctaccgtgacctcgctttctgcagtctagtctaggcggacagacctacagctcaacacaaaccaatactaaagcgaggcaagaaacaaaggtccatgattcctagggatggaattgtaggagcttttcggtgatccaacgttgagtcgctcatagatgcgctgatcaaaagcaagagatatgagcatgtcattgtcgattatatttctcccacaagcctcaattaagagggccgtgaaggattcaacagtcaaccaacgttgcttgaccaactcagcatccctttctctcagcaccactcttactcgcctctcgctgggcatctaaaggcattaagaatgtcgctgcaaatagttgcggtaaaagaagacgtgggtttcaacaggcctcgattaagaaatgtgtccttcaacacttccaaccaggtcggtgagtgacagaagccgaaaagcctataaatacgtcctccacccctgcaattgctctactatttattcacttgattctgcaaagtcgagcaggcttgtttctgacgcactcgataagttctcccctttgatcgagtactggaatttataccgtactgacatttatagtatacattgtggaccagtaaaccagacagttcctgtactttaagagacgtggttccaagcagattcactgcccatttacgccagccgatcggagatacgagatttggattagctagtcaaggcgtctatgcgaagacgtctctgctatagctgatctgctatcgcggctctggttgaccacaaatttgaagtgcaactgctcacactgtaggtatatgggcccacaaatccttgaaactgcactgacccgaaagacgcgggacagccaggtccgtagaggttcgaacacaatgcaccagggcaagggccacagcttcttgtggtctcttcatccctggtgttgaccatcagaacatgtgagttatgggcttccacgctgatctactggctaataattgacagtgaacctttgagagctcaccagagtggccctgataaccttgcactaccgtcagtgctccacgcaaagccatggcttacacactattcctagccccgtcgcttcgaacaatgcagcacgtcctaggtggaagatcgcaaaccaagatagcgagtcaataacagggtgcggccatccacgtgcgaacttcgttgtatagaaccttgagactcccattcccatgctaaggtgagtgagatctaacgcttacagctgcgctgtctaattatccgcgccaagtcttattcccctaaccacgaactccactaacatcttcacgctattgtaggggcatcctatcatcgacggtgaaatatactgtggcgagtggcctattccgccagatcgaggataagaccgaggtggcgaccgacgagggtgctctatcgcgtcttccgccctcgtccctaccgccttcgcactattgtggagtcctgaacctctggcatcgcgacacattcatccaccatggaagtgcaatatttatcgcaagcgggttcgtaacgcgcgtttactatctcaacaaattgtcttgtgcaccccagcgcggcttttttaaagcgagtgcagattgcgataagcttgaatgcgacgtggtatggctggtaactgcattgcagagagttgtaagtgatctagttgtgaagccgatatgaccattgtgcaaactgatcgtcacgtctcaagcgcactttaggattcccataaacaggtacgctacgacagctcgtctaagatcaatccttgctgactcggatcgtacaacaggaggacaccctcatttctatcactcgagtcgaatgccacgcgaacaaatgtcttgtctgctcgagctcccctatacaaatactgtcgcatgctctctgtcccttccgcatgactactatcgacgatgagtcaccagaatattcgtatcgcgtacctcggcctctttctccctagattctgtgtatcaggtcattgttcgatttgtctacatgatacaactcctgaactccgaccagcctataccactacccgaatcatacctgtggctaagcatgcaacctttcaaataccttcaagtggcgtaggctgctggtatcgaatgcgtgatcctcgttgtctgcggatgacatttgatgtctttccagaagtggaaaaaggcgcaggaatgctgatgttttgtcttgcttcctggcagatgagcgtacctctgcagacaatcaggctgttagcacaagtccacctgcaaggggaaggagacggaaagtcttctcattcttagcctacaatttgacattggtcaaaccgagagggtaagatcggggcacaggcaagccaatgagagctcactacccaagaatcacctcgggcatacaggaacctgcatcatgagggctgtcaaaagtgttgtggtgtacccggttggttcttatgcacgcgtttcaagccgaagcactatttgcaaagaccatttaccctgggtctcacttcagctgcaggttagtcaagtcgaccgcgcgtatcttttatccgttcatatcgtctcctaacatatcacgcacttgtcaggaaatccgttttccctacatcccctatttcgactttttttttaaaataaatcatatattcgtcgagcctaccgcgccgcggaggacacgtgggcatgttactgttcggccaggcagccactgtaaagaatttggtgtccgaaaccagaatgtttatgggacctcttggactagcccctagatcctggagcaattttcccaccgtcaatcaacgctcatgtgatggttgcttttggaaggatggccggattgtctactacgactacgagcgaactagcactcctgcgggggatatcacctaacggatattcgtttcagacaacactactagaacctaatcgggtttcaatcaggtcttaaccgtgttctcttatcagcagaatatggttgattgtattaacctgggacactgcttcctaaaaggcaattgccgtcacttcgatccgggattggttgaaatatgatccgtcgttgccgaggcatagtaggagccaaccgggtattcttgattgcttgcttgtccagtctctcagcaacatggttgtctctgtggtaaaattactttgattcttgcgctctctgggatataagagctggaatagggtaaggtcgagtgactcacaatcgccgcctgaagtgatgactttgacttcgtaaggcacaaagcctaccgtatggctgattttactcaagctaatcgttcggtacctcatcatatgcttctacacgtgggtcttgggcgtattgcttgatcatagttgaaccagtggatctactgtcctatcggactgaggctgtatgcccactttaccgagtgatcagaatgggactagaaatggcttgcgaaatagaatcgacagtgattgatacatttatcatgtgggtgagatggcaagaaaatctccgtattacgtccgtgtgacattgatagacctcgctactgcctataaggcccatagatttgcactgagttactaccccctgcctataggcgggcgggcggttgaccgaagccccgtgtcatataatatgtccataggttgcttactaataagcactttggtcactgaaatttcataattttacaatgtttagccacatatgtatatatcctatagtactacgtattcaggttatttaagtagaaaaggatacaatggatgtgtccagctataaccaaccctagtaaaatcaatggaatatcgagtctaagtgaaattgaaagtatggtccgaaatgtatagaaattgtgatacgtctgcattgtgtataaatatatacatgaccacaaaacatgctgaacctacaaaaccacttacaatataatgcctaccagtcgcatctgtaaatttattataaacacgacatattagttatactacatactaggattcacctttattatgatcaattatctgctatactagtggttattaggggtaggtgacaagtgatagatttccaagagttgaacccccctattcaggaaacttatataatctgagggtggcatggaccgatggcaaggcctagacattgaccacctttttcaccgcccgatcaacacacatcaacacttaccaacactcacatcaacactcacattaacactcacatcaacactcacatcaatactcatatcaacactcacatcaacacttatatcaacactcacatcaacactcacatcaacactcacatcaacactcacatcaacactcacattaacactcacattaacactcacatcaacactcatatcaacactcacatcaacactcacatcaacactcacatcaatactcacatcaacactcacatcaacacgctcaccaacacgctcaccaacacgctcaccaacactcacatcaacactcacatcaacgctaacggttcaacgcaacaagcattcctagacaacactcatctctgtttgcctaatctgaatgaaagatgccaatttctattgtagcgaggaagctattggatcataagctaccaaaggaaaggaatgtgaaatacgtcatttgatactgaagacgctttagttgttagtttatgattttggctattgaattggcgaagatctaactagggctccttctatgtatctaatgatgacccttcggaacaatgaacagacgatgaagatgttgcgcaggtctttgcttcttcgagtactcttgaatactcgaatactggtctctaaagatgttgcgcaggtctttgcttcttcgggtactcttgaatactctaatactggtccctagcaccacgaagaggtgcctgcacgggctagagggactttttgtcgcagatgtccctgcggagactcttggtttcgcagatgcccctgcgaggcgctttgttgacgcagggcctaggctgcggagaacttggtaatgcagcggtctcctgcagagaacttgttaacgcagcggtctcctgcgggtctcacttgtcatcacagcgtccccctgcggagttcacttggtaacgcagcgcccccctgcgaggattgttgttcacgcagacctatcctgcgaagcacctttttacactcgcggggctcgtggcagcgagggagcgcaagtcttacatcactgggcttgtggcagcgacagccgtggtcacggagactctcaagcccgcaggcaagagagggatactatgacataccggagtgtgaggaccgaagtcctgaatttttttgggctgggaatcgggctccttttatatttttcggctacgtctctaccaaggaaccagttgcgcagttggtagtgagagtcacggtctcgttaataagcgttgaagtaatttcaacgacgttgaaggggtgtttggagactttgtggcctatagactcaagtctcgacctggcctacttcctcttaaaattgtgcgttgagtatggtgaaccactttcatcaactgttgaaaagaaagcaacgccgcaaacgtatggttcgtacatatcatcgaatttgcaattaaatcgcttaacgcgcttacattctacatgtccccattttaaccacggttaccatttcttaatgagggttgaagtgcttcgacagatgccgaaataatgggctggagatggccgacggaaacgctgtactgtacctgcggttgcccgaggaccctttggtctcactggtatcaatcctatccatctctaggctcgcgccgctgaatgttggttctttcctttctactcgcagctaacccatattgcctttactaaaatctctactaggcgcataggcactgtcatacttctaaactcaggacgaagattgtcttcctttgggaagatataatagccaaaaaaggtctagaccctttgaaaagctcataagaaactgggtctagtttccaggacaaccatataaactgatgcaaccaaggcccacgagctaggttctcatgatcgccacccccttgcaagattgtaacgctactatcacactgatgagaacctggacacaaataggaccaggcagcccaatcaaacgctacgcgtgaatttagacagacgcaggtacggttctgcgatatagatctcagcgacgacccacgggatagtagatcagggaggttctatttgtagagagaaaatggaaacaattgcagaggtccagatataatccacaagcctaaagttttcggccattagtgtccgatagaacgggactttgttgcctaggaggtactactggggcaggtgagtatttggaatagtacgcagactttggcgacacaatggtaagctacaacccgatccgtggttgtgttcttggtcgcagttatgagaaggtaagttcccctattaagtggcaagctgaaatttgcctatctggtctgtaggacgttctagatgctatgtatcttctcctgcaataagctgataattattgctctctttaggctataataacacttcctctctatatctccaaatctaccgctatttcaataactctagcagacgtattataaagaactatactaattatagacaaaccacataagcttaaataaaatgcctctgttttactaaaaccggttggcccctggacaagattttattgtagaccggccctcctgcggccctaaactttatttcaatcaatctgcgcctcttgatcaagatgatgaatttaaaggaactttctaataaaatattggtcttactgtagtgaatttatcctatataccggccgacggagattgtagtgattcttttctagttcctatttttaggctgtaaaggcttaatcacaagcagcccagaaagtaggtaggaaaactcccagacttgaattcttcattataaccgcattctcttaccgagcggcatttctatggttcatctaaacgagctctcgaaatgatttgcggtcccgctactaatcggcagtcccgctcgtggttctgtggtctgtgccgaactttgatttccttataacttaggcgtgggttaaaagtaaatcggattcactctatagatcactctattttcgaccaccgattcaactaaacctaatcatacatattctcttaagctaataaggttccagatactttcagtcccagagtccccttgctatcctgtcctatctccctataggaacgcgtatagtatcataagtccttatacactatccgcagtattttacagctatatagaccattcccctggtctagaatgacaggatgaaactgtgtcgctgggcctactctcagatatacaatcatactcgaatacttacctttaactttggaacttccttaccactgttgtaattctaatactataatcacgtttcgattttgaatagtaaaatacaaatagataaggtcagtaatacccctagatatattatgtattattactgatcccgcctcgttgttgtcctaagttaagtctcttagcttaagcgtcctaagctaggtaataatcaacccctaaatcgctgtaaaatggcgcgaaactcgagttcctagcagcgtactatagtcgtaaatgataagtagtaagaacagtctcagtatattataaataaccaaaattacactttcttttcgctacggatactggtatatgctagtattaggtgtcctattaagacgcattaattgtttttctatctggatcgtgctgttaaagtgttatcggatcttaggagtcgttctcagcgtgatataacgctaatatgttgagcgtaccccgtttactatacagggataaagagagaataacgaataaccttgtccttagtggtaaaataccacccccccgccccctacagtttaatagtaacagttagcaataaaagtaatttcggagcaattaagtaatccaatcttaattatatactaaatttgttcaagatataacgattttaggtcttccgatatccttaattagtaatagacttggttcggtggtaagtaaggttttcactttgtcccaggtacttatactgtaaagtcgggaaaaacagctgatttcctgtgattgcttccacaagcatatctcgttttatattatcgcgaactcttgaataactgtagatcttatgttctatatcctccagtgcgtagcttaatctctacctaaggaaatatagactgggaattattgcttatatccgatacgaaggatattcgaagatagtattatgtttaaggccttccccctcgaagaccgcaaggatacgatatttattagtagcaataccacctttaataaggtattccttataatagggtgactttcttggacctagccctgtatcaatatatttaagcctagaagcagcttcctccgcactatatacgcctgccaaaccctctacctatatagtaatcacaataatatcaactcttccttcatcctctagtattttacattactgtatggcccgcctctaagtgccgaaggataggaaccgcgtaggtttttagttctaagagagatgattattaaagtctttccgcgatagcgggcttttgtctcttttccgtacacataagtagccttctctgaagcttatattactgctgcactcagcgcaaaaaaggatagagagttttacgtcagctggtaatggatcgaggaatatcttaatatagtatttaagatatactagaagcatataactcgaagtacagtgagaagtagtatgtagtctgttcttggtggcttagttgctacaaactgaataaataatggatcattgccgcccagtgtataaggtcgaccgacctttcgggtagctattaaccatgtgatagtctgcatatccacaaaaataataaaggttataacactatataactacctaggcaactatggtgagttctaggtatttatatccatattataggttatactaacggccacggaagaaattcggtactaaggttatataatacttacgaccgtctaaatatgatttattatatatacaattcgcgcaggtaagaatactagggaggtatatgccatattttgaagaatatggatctcgatagaagtcactggaaactgcctaagcgaactttccgacaattgaagttatttccctgaggcactaaggagatatgcctcaatctcttattagtataaatactgagcgcgctcgactggtatattgtttattggatatctgcagtagaactgctctagcttcgttaaggcaataaaggacaaaacgatatatattaaacctaaaccagctatttagaaagggccagtaatattgggaatactgagactatatccttttaaaagctaattactttaatctacagttaaaattgtctaaggattagggaatttccaaatttatatagggatataaaacacattcacgcggttgtacagtactcggatacggatatagatttcgctgaagaaatttaagacgtagccactatcgcttattcgatatagtaggaaagaatagcacggagaagaatctattatagaaatgaaaaatttgttacctttatatatacctgtaaactaacgggagcttatattccttacagaataagagacctcttttaggaatttaaaaaaagaaccacaaagtaatgtatatctcggctatattttctctatctgacctaccgcaaataatctttttcatcacattatttatactttatatggctcatcaggctacattggcgactctatacaaaaaggttattatagccttaaaaaatttataggaaaccttcggaaaagggatagcagagcgaccaatgacatactaaacataagattctattaaatgcaaccacaaatatatcgaggctctgtaagaaatagggatcgactagaaaataaataattacgcttagcgtttctgcgttacttctatacgatttttctaataagggaatagtaggtctgccattattcaattgatcttcgaggacttgaaaaatcacccctctaatttaatatcctatatatagtatagtttgtatttaaggaatcgctagattacattttggtatattggtaggtaagtagtagagtactttatgccctgaatggacgcttatatgaagaatttgcttgttaggttgcttggaaacggctagtggacgatgtggtgatgaaattcgaagttaaaactgtagtaaacgttacctactatttctatcctgtggtagccttcgatctactaaataagttggttctgcagattgttagcaagtgttagggaagtatgcgcatttctaaaagattaaaaagagttttaggttcttaataaaggcttatatatatcgctgctttagagtcagggagctgggtaagcgcaacgtcactttgaataaaggcgaggataatttgtgctagatatatatagcaaaaagcaacagatctaaccatgaccttattgtttaatcctcatttaatccttaaagattgtttgaagactattgatgattatagcttctggtcttagagtataatcagcggtttattaggctgactaagtctaacgagttattagatcatggaaaatatgctctaggggtgtgtgtcttttaagtcccctaaactagtttcgacaaagcttaataagaaataaaagaaagtaaacggctaaatctatatctacgataagctgcgagtatggtcttttactatttctcttaataaatgtcaatgttctaggtggaagagaatttacagataatcgaaaatgctatttagataaatcaaagtatctatttatcgttatatcaaaggctataatatgttaaaacaaaaatcttccaatatttgatgtcgtgaaagtataattaacctaacccagaagtggatggatttatttattataagacccgcatctgatggaatcatgaaataatatcattaaggaccttcggtatttatattagctctagtaagattgtaaggtctggtcggaatggtcagtctgtacttacattagatctaagaataatacgttgctctacgatatttagcaatgtgctacgtatatctaattaggtaattagtgactgtacctgtagagccaaagatatataaacataggctaatcccgcctgcttagcctatagatagctcttattctctagatttagtaatattgtctatatacttgagtattaatatttttaattattaccacctccgttcgaatacttgtcggctactaggtactattgaacactgtaattgcggaaatatttactgtggctaatactagcgagctactcctaggtacaaactgtgcgcttatacacgtaggtgagactattattagttttttgattgccagcattggtataaagaagaatgtatcttaaggtaagctccttaaagaaggaagatacctagtctaataacttgaagatatcgtggtaagcttgatggcttaagccaaggacgtgacctatcaggcatttatagtaaggcaatccggtatcggagctttattagaataagtctttctaagtagagaatttactattttatagctcttattagcccttaactctctagttagagctgtgtggtaagtaatataaaacttagaagacgtagtaagggctattatgcttttagagtgcgtatatctgtatagaactaatgatttaactaactagccaaaaccctaacagaattgtcaacacaaatcgagatggcttggatttaatagccggtttcgaaaaacaactttgtactaggtcttacttgtctattctactcgatatagaaataagggagtttaatatagcggccgagggcaataagatctacaatatatcttcattctattatacgtttaaaggaattgaaagagtgatagagcctatatacgatggtggcatatccttctaggtatcgtgcttattatttggaaatcctaggggtatattattaccgtctataactatcgtggaatatgattagttagtggatctaggaaggtttcccgaagtagtatagcttaagacactctctgtaggctttcctacctttacctgtgaactttctataggctgtagctttaccacacttgaagattccttgttacccagtgtttccgctcgactacctataaaacctcaagtcaccgttactagccctaaagtaaagattacgaacgcctaaataggagaaaatagctagaagctatcaattctatataaaacgaagaaatgcagataaagtggattacttcctctataagatactttcttttggaaagagattaaactgagactctaagctttggttaattcttcgaagcctttaatcaatagactatttactattttagtataggtagccagtgccagctcgattgtgtcactttaggaagctcttcgctccttataggttattgcagagaagttgtaatcggaacggtatgtacgtgatttgtctagtagtatcaggctctaagttattgaagatttataaggaactattcgccactctaatatattagaactacactatacggtctatctataccgtagctgcggtggtagtgtataatccccctataccgacattattatcgttaatagggactaactcgggtcttaactaaaaaagaaaggaaacctagtgaaaaacaaagaagctgaaatcatagacttaataatagaaagaattttcctatgcccacgggatttagaataaaacgtatataaataacgaaaagtatcagatttacgaagacttggatagaggctatagctcttaatcgatcagttcggctataggattatcgggctgttatcttattatagcagctgtgatggtcctaggccaaaaatttctatgaatatatatatctccctgctttaatgattactaagaaagataagtgttaataaatacaggatacttaccctaagcatcgagatcttccgagaattcattaatatacttaaagcttcctaggggtagaatcttcgtagaatgagtgacatcgtgattctaatcatttattacctagtctttaaagataaataccaagccgtaccgttccctatagaggatatagataccgatagtattctctaagaacctaaatggtctaaaaagctatttagtatcttctcttagtttattagagtaaaatggaactaaaaaagcttattttattgtgataaatatatttcgagtcgagggataatcaaaaaccaaaacgattgatcattttttattttttttattttttcaatcatctgttagataaagtctctagataagcaatcactaggcgggataggccagggagttttaaagctaaaaatacgcttaactgattattgggctatatattcgcctaactgcgatcaaataacaagcaaatgtatatagggtggattagaaacaaatcctaaactctgctttcttagtacaaatggacggactaacgaattatacttaaagacttcatataccacgctataatataagcagtctggtattaagtataagcagtctatcaatcgtttttagctgtataaataagctaaaaaggtagattagctgtgggaaagagttaagacttcccgtataatcgctgataagatagtcttacaaaaactataactagtatccctacgctaattattccctactttagccactatcaacaactgtcggtcgatagtcctagatatagtatggcgcaaagcccttagtgctctagaccccttatggcgtatcgaataggataaaccattttaccgcctcttttaagttattaacttcagctagcagtcaccacaggtaatttaatatctaactaataatagcctagtttttttagtaggaacctaatatatatcgcttgtagtaatacagaggatagagttaaaatattagcaaattctctgttgcagtttttcttatacatgatttctataatgatgctattcttatatattataccatacatttgacctactgagctaatggcttagcaggaagataaaagcttgctctatataggctactattatagagctatattcctattagctgcttatattaaatatgtatataccttgattctcttcctcaactatataagttttgaaaagtcggtgtatatatattggcgagtataaatcacactgattatagtggaggaaggtagttattcttcctatactctttacaagtaaattggcacaatgaataccataacaaacgtcactaaggctaagtaagtctgagctcttttcggtatttaggcactgcctgataagcttatatacgaagctttaacagccgctagcgttgatccaaatatcccagatggcttcaaaacgcttatacaaatcggaatatccttgattaatacttcgattgcgaaaattggtcataaggcgtctaagtctactaaaataaggggcatgttaaagaatcagagaagaagaaagccttctaatataatataggattgatatcagcggtatgggccaactataatactattaagagtcgagcctacattgcgtaagggaacggtattaataagttaattaaatacagcacgagtggacacagggctgagaatagtctcgcttcggccgttagcgcccttatagtagtgattgggatagggaccggtagtttagatctagtgttagatagtatgctgcggcttaggtgagttagcttaggccctttatctgaagtgtcattaattctgggacaggtttcttcgggaaggtaagggaaaaatgcttttagaagcttacgagattgccaccgcttaacctatagaagaagacttctaaaggcctagatatcttccaagtgttggcgacatctcactaatccaatcaaatccactatataaaactccacttccatctattctgtctcctgataacagggccattaatagcgttcgagttggtacggagcagatagttctaagctctacaccggatatcactatacctctatcactgacctttagcgataacctggaaacctaggctttgaatgatttagatatacgttctgtgaattattcttgaccctattctctagagggcgaggtcctataagcgataaacgtacctgtccctctagatttagaatatcccctttatagctcttataattgttccttaccgatagttcctatgaccgcttgcctcttattataagatctacctttatatattgaggaacactattaggtaggcctagagcctagcaactaaagtgaagcgattgtttaagttttaaaagagctatatatcagccaagtctctagaaaacggcacagcagtacctaactgagtaatagaccagagaagtgtgtagcgataagtctaaaaatcaagtatagtggctttctagagagggaaagctagaaatgtgaagtaaaagggcaccctttactgtatgaaatatatttctaaagatatatcgagtaaaggcttctaaccacactccgctcttcggacctattaggaaccattctcattcgcattactgatactggtgcttttatctgtctaaaaaatgccctgctaagctctaacttatccttaggagaaatagtattgcgacagatatctaagaaggaccgatacaaaattataaatcgtctcgataggaagtttgctcttaatattcttcttaaacgctaccacctaatagaactttttcgagactgtggagggctttaaagctgtacctctacaaacttggttttttatatagtcgaatccttcctacctaaggctcaaaaaaagggcaacctaaatcacaatgataatactatgattacagagagaatgataagggaggtctttccacaattatcgacagataatcctaagtataaacgaagatatagggcaataacgcgattacaaattattggacgacgatactaaaccctagtaaacaattttgggcagagtataatatacctcttacagccatacttattaataggagagctggacaaaggagtttcagataatatatatgtaccctgcgggattatacctataggtaactaatattttaaaggatctacgacttgaaggaggcggactttaaattgttagtcgaactcctagaggcctcttagggtaagctattacgcgatctttacataaaggcaaatccagtggtagaagagctaatatatggctattaaactcgagcttatagactacggttataagaagttgaaattgaagatatagtgataatccctaaaagatctcccgatctggaactgttacttagctctaaggattctatatataaatatagagtgatagtatgataaagagaagctgaactgcaatttaaggtttttataaactaaggagtatgagttacactatatgtatattaaggaaaaagattattgtccctagtttcctaaactgtttctaggtccgaatgggtaaaagattgttaatttcagctgagctggatcgatgtcaaatatactaggtctgtcaatagtcgattaaggaataagaatattttaataacattttgaatttattttacgataaaagtccgctgtctgcaaacgagttttataagtaacagatataatacgatttacccttctatttaaacctctgatatgactctgcgttaatataactataatataaaggaattttttaattcatatgttcgtcggtcgactatactctaactctaagtcgctatagtgtcaatctaaaaaagtgttaatatatagctcttctcttatgacttacaactgacaaaccgatctagttatgctacctaatccttatctgcttgagagtagtgtctagctttatatccctcacaaagctaacggttatagggacctttgctgtcataggatattagaggcctctctatatagattccgttctattacctgatccagtagacgatcctctcggcatataactagtctaataccggtcggcttagccagtggcaaaatttatagcgttagtagtataccctcgtattatatttctgccctagaaatagacgaatagtgatagcgatcatgttgctggaccatctacgagctctataagctcgattataatatataaagtggcctataacgtttgtatcacgtatattagttgaacttatattatcattattctcgtagaacttatagtaaagatctggttcaactagtaaacttgataccttattataaagatttttgtatatagaccatgtagctataggcttttgtttcttagccggaagcatttgtcgcgtataaagagttaaaaaaattaggaatatttttgctgtttagatataagatttactaaagctcgtagatagtagaaggagagtgtagatttatagtaataattagaatgcggtagttaactctagttctgactgtcgaagatgaagtatttgtataaggggagacagaaatatctcccaattgactattccaaagtaacgttaaaagcctataaatgaaagacctgccttgatatcaacctacttggtcattataaccttaaagtggacgtaatacctgcttttagaaagataaataccttaatcttagaaaacgctcttactagccctagaatcctttgcaataggtagagtgtaattagaattagtaaacgaatctataatatacgtacttttttttcggtacgtagggggtggtcgatccgctgatctatttcccgattgaattaaaatggaattctgtttaaaagactgaaaaaggcaaagcttgtattagaagatctctaatagccggttagtaactataagcgaatgtagtttcacgttaaataaaacgaccttgaatttttgaatagcaaatattcctccctagttctatagtaaggagactgcactctaggtctgatataatcaagacagcctgtagaaagaatgccccctgctatatactctggtatcgaggaggtaatatgtttggaaaggaataggcggtctagtggaatataaatatgtgtatctagtaggctgccccaatatttgttgaaacctaagctacttattctaataatattaactactctatctgtatctctaattcttagtatcactatgaccttaatataatttaagacagaggcgcttgaaggcttatatactcaagagcagttagatcttttggattctatcgataccctccgatcctaaggtattagccactatgtctcctttctatagatcattgtctgcagtgaccaatcttctggaaaaagctctgttcttaaagctatctccggtatctcttttccggtgaaaagtagtctctgtactagatttctaactgaattggttctgtggaagaattcgcaagtaggagtctgggtttctattatcccctattaatcctgtagcgacgcagagtagtattcgcttagcagcttttgtgaatcactcgatgattttaatagtcttacagagttgatagagaacgtaaaggtagtaataggaatctcgatctacagaaaagcgttttcgaatgaccttctgcgagttaaggtctctggcctagatcggctatatcttacaattgttaatcttctgggactaatctacttggaaacacagtagtagtcggtagccgatgtttagttagttcaagatgtggtctaattgtatatacaagagccccgaagtattatccttactatcgtctctgtaaagaatgactttataaaccagatcgttctacgtttagtgtgggatactaatctatctggaatcaggactctaggcgttatctctaagcctaatgtattggtgctaggatctgagagtgaagcttcgtttatatcgcttgctaagaatcaagaggtagagttctgtctaggatagtatgttttgaagaatatagactcggagaaaggtaagtcaagtctacttgaccgaaacgttcgggaatacgagtttttctcctaaggaatttggaaagagcttctgccgttacttataggtgtggactctctaagaacgcgtctgagcggtctacttcttagctagattgtaagcgaactccctagccttattaacgagatcaatgtaaaagtcaagtcttaccagttacagctgcagaaactcggcgacccttgggtaatagtatttgagcaaaggtcgtatcttttgcatataggtcaagctttccagtctcttgttaaagcagccgtagaaggcatatatagcgagcctttctttagggatgtaaaaatagatactggctgctaaaagcgaatctgagtagtcatttagaacttgaataagtaatttacgaagaagatctctctgtgcggctattcacgatatgtcatcacagacaaagatggacgattggtgtctaaatattaaatatcaattatatgagacgaatatatttagtatattgaaatacttcttaagaagataagaggttgagagttgcctggaatatataatcctatgatcgtcaaagatttgttttaagaacagtgtgccctatagggagatattacgtaaagctatattgatagggcttaggtagctgtaagggattttcttcaatatgtagtctgctatatggtagacggggctacctcgaaaaccatttttaataagatagttttactagctctgggaagcttacagtatgccctagaaaaagggagtagagagtttcttatatcgtattaacgaggctatctaattacttacaattactactttactaaaaccctgtaagatacttgagctaatcgccaaaatgaagcgttccgtaaggctttataatcatactttggggctgatatactttcgacctcctaccctgtgggatatactattaatctctggggcctttacaactcccttattcagaaaagcatactagatatgactcgatttacttcagaggaggcactggactgcatgcttatatactataaggtaagacgtgtgacctctatactgttctaaatatcctattaatctcgatactgctgagtataggttatactgaaacgttttgttaataatgtcgctactgaagtgatcgaaataaaactccttaccgttctaccagtactctttacacctattactgtatttgagatgcctgaagacttggtctctaagatcgcaggtgaatcggaagaaagctaaagcctgagggagcagttaaatagaaaattgtggattctgataaagggctctgatatataccggcgttttattagtataagaggacttggtaagggaaataaactcatattaggttatatatatactgatcggactattagatacgaacgataggcctaggtctagggcttaacaggactaggaagcactgtctaagggctcttgcagcttaatcgaactacttgtagaagctgttagtagtggctatgatttagaaagtgtagtcctattgtacagccctacgttattagaaccgactccgtaacccgagtataccatcgagtagcatactatagagccgacgccgctgtctataacctctgtttcaagtataagtggtaagaagaagaataagaaaggaaagactaaagttcaatcttctgtcgagtccctgcttaggtaccctgagtagggataaaaggaatttaaaacttaatctacaatcagtctaattaaatactagccgataagcgatatacgtgttagaggccggtggagcgtatatatttcactcgttttgatagaaaaggttgagctaaatgtcttatcccttctaatataaaatattttgatcttaaagtgagtaaagtgtggctctacagttcgggtccaatgaaaataacgtcgcacattttgcgacgctatcaattctgtatactgccaattgtaatagggtcaatgtccctcgaatatgactaaaatagaagaaatgcgactactattctgtatttacttagactctgattgacggaaggcgcttagacttaaaagccgataatacgtccctttaactttacttactgcttagggtttaactttgtaccgaagaaggggggtaatgtacagataattttgaaataagaattcttattagatatattggtttctaccgtttcagtaaacttagagctcaaaaatgtagacccttaagggtcatttaggtcggatcttgccagtagccctcttatccgaccgtataccactggtgttatagacttaacagtccaccgctttaataagcttagtttaatctatctcttctgttatgtatacttctatctaactaatctaaatacgtagtattataggacctgtatgtggctaaaacattgtaaagtaaatacgtgtattaagggcttgttaataagcggccataggctaactaacgctatacccgcctatagacaggtggaagtaagtcattgcgaatctataggcctcgtaggccgagtcgaggtcgattaatatccctagatgtaatacagaggttttcttaccatcttatctatataatagatatatcaatttattaattctatctcgtaagctatctctagtgccattctgattactcggtgaatttatatacagcccctacttcgattgagctggtcgaatgcaaaccctagactgccctccgttggttcaactatatataggtaatacatacgcttaagattagacctaccaggtatagaagtatttataaggaaccgctcgaaataccatttattagcttaattaaatattgtgatataatagactctgccttcttattcgaagtcattgcttcagtcggcgattgtaagtcacttaagcttactctactataggatggctatatcctagaaccatcctaagggtgaaagtggattcgtaataaagaaaactaactaagaatatccgatcggctcctatattcgggagtcactgtaacattataagtaatccccctgttagtaattacaatttatattataccctatatattaatatctagtactatatccgaactgccggtcgttgctttccagggtatagtacccgggtttatacaattaagcttactctactgccgatagaacgcagtaggatagctttaggtagtattgttatagactgaaacttacctttataaaggatatacttgaatagtgatatactaaatatcgtccagggtatggtaagtttgacaaatatatacttaatactaaaaggatagccgacgtatagtatatagaatccgacgagtctatagcaggagctacttgcgcgcgataggttagaaaataatatcaatagacagagatatacagctagcttaatgacctgcagtttcagtgatatccaaggcgtatacaactctatagatatctattagggttttatagaggaataggtgcttaggatctaaatctactaaatatctgttctaaaggagacatttctgataccgacttgatagctttatatatttcccattggtccgtttccgctcgtttatatatctcgaatacctaagcaatacagagtaggattagatgggatagtatcggacggtatttttggctctttagttagctcggctgtaccttggtataaacggccttatcttctcggttcgtagctagtaccgaaattagcctataggttagaaacgaagggagttttaccttaccttccccttatacgcggatttggactaataatatggctaacggcgaaggtagggctcccctactattaaataagacgaaacatcggtatttcccagtgcctataggaaatattcggctttaaaatatactagatactatctaagaataacgtggggccacctattagacgctactagtccaattcacaagggctattcgttcacaatattcgaataagatacacagtagtataagccattggaatttagggtatatatggcgtagacgcattagtatataacctaagtgaggtacagagtcgattgagagagaaaggcgaaggtaaaggcgattagaactttacattagcttatcatcgatactactaatggtcatttcggggtaatagagtataggatcacatcggtattagggagcccgagtagataatacacttgcacgcttcgacttaagtaacaggaatataacagtaccccctattatacgatccgattcagtaaggcttgaaccactaagacgagtggttataacttaccagtttataaagatcgcagaatttttacttagaacaagtcgattaattagctttatggttatatcttaccgataaagatcacttataatcgtcttcagtaatacagtcaccatttatactatattaatataatattatatctagttcgttatactctctagctgttacttcgaagaagccgcgccggatataccaggtaacttctgagccctaaaggcgcgcgacaaacctacctataataagaaattgtatagttgtaataggataagacctcgcgatatagacggcaaacatcctaccccactattatagtataaaggcggtacagtcgaagggggaagacacaatagagtacatgtcgtagtgacctaggtcttatcttagacctaggataaaaggactccttacaagtatatttcataggtggcgatgggctgctcctatctataatagtataaatattagtaatagtattcgtgttatagagcgcaaaatattgtataaataactagatatagtgtagtagaaggcacgataaatcacttaccttaataggaagaatggacgttttaagcttctatacagcgaatttcgcaatcggatattcgcaccctgttattagcccttttatttaagttatatactttacctagggtatgctgtatggtataaagtgataggataaggtctagtgtatcggctatagctttatatagaatactaatataggtactgtatcctcggggccactctggtacaatatcaatggttccactatcatacatttagcttatagaccggtaatataatatatgactcagatggtcgggtggctaaagctatagacgaagagatggtaaagagctgtagtccttacgcttatacgttatggtcgaatgtccttggttctattaaaattacatcgactttaggatcagtggaactccagaataggttaggctaagatttatatacctatagtgtagatagtagcctttttgccttaggaatatatataaaggcggtacactagattagtacagtcgactagatggaccttattagtagaaaatataactcgggggccggtagaatcttaacgaattctcttacttattaatttgactctaataattaatacgttgaccctagaaaccttaatagcaattctaggaggtaggtgtcccttgggaactctaatctagctcctagggctatatcctagtgttaagaaacaaggcgtgacattaattacccagtctttttaccgctaaaatatataacttttttgactaagcgttttgcttattaattatgtcagaccagtttgttaaatttgggccttagttagagaatcttactatcgtgaattttactaatacgctcaccataccttgatttctgtctaatacccttattatacgatatagacctaattagccccctatggagctagctataattgggataaggaaacgcagttattaaaccctaggttttgtcattatatatgacctttttagtagcctcttgcgatggtaggattagcttattacagtgtatacgtaacttttttcccgattatatatataaaggatatttcagaatagaaaaataaagaatgcttagtaataatagatatatattgccagagtgtttgaccaactaccatcttattaatttaagtgcaatcctaacttcccttcccctagaacttgctagtgttactatttttgttccttagatatatctaaatcattagctttatacgttattttacctattaattatctggcgtttataagagaagcccctagatatttttttttttattcgaactggttagtctagtactccgctggatttatagcagcagtaccttagactcaactatatagtctgagtctgatatagataatgccgttcgtctaagtaaagaaaatttcgatcgtatcctttccaaaagctataataaatggtcgtcctacctaataaatgcttataaaaccccttatctcctaccttcttctatcaatctaaaatcgcttctcgaaagaataccgtctttccttagatatggtctggtgcctaaagatactgaactaccctttacttgtattaaaagggaatcgagcaggggacagtttagtctcctaattactagacaatcaatctagactactttacgtaggcaatgttaccttaaaccgaaaataatagctttagatattctgctagctattcctaatctattaatagtagagatatcaaaatctgcccctctgtaagaatggcctggtattaatggtatctcgaaccatgacaagggaaattatattagcgttttgttccttatataggcttatatcctttctgcgcgataggtagaattactagaatatactttaggatactaatatagtagcaaattcacgcataaggctggtcagcttgcaataggtaccagatactataatataattgaaattgatattagatacgatattaaagctactaaagcagcttggtagagggctatattacactctggcggcggctgggaaataataatagattacaaaaaaaaaatatactacttaccttagtctattattctctctaataaagttaacgtagggatagtaggaggttatctaatctctaaggtaggaccgctgttatctagtactgctttagaatatctagctaggttttactcctgttaccgactctataggcagtgttccatagccctagttactgcgctttatatcctattacttagcggagattccatttcacttcctatcccaaaatcagccttacactatggactatcgtctctattataaaaatccttaaatctagtaaaggaatactctgaatatctttcctattatatgatactgagttataatacatagggtatacgatctttactttccagtaccttctttaacagaaagattaaatgtaaccttattagcgcctagcttaatcctatctttataataataaaccctttagtctagggcgagaagcctcttacactcgctaaggtccttatatatcggcagcctagattagctaacctttggctcagtataattgtagtaggactagtaaaccctataatacaaaatatctagatcgggcttatagccacagactttaatacagcggcttagataggaacgtaccaatcttttataactgtagaacctagtactaataacagttaaatgatctatagggaagacgagtgtcatttactatttattatagcctataatagatatactagaccccctatttatccgtagaaactgtttagagaaactcgacttcttgatactgaaattgtagtatagcaatataccgcttaccgctattactgtttaaagtataaaacctggaattagaatctagtaaatagagaaatgctcgaagactccagtatatctctgatagagtttcgtagggaattcctaataaagaaatataaggaaaactactacccaatataaaataacttaaacttgttttcctaggtagcttcggaggctgtaactcgcagaatttttagttagcttaggtctacagggtatctagtaaataaaaaacctttatatcagtattcctggatcgatattaaaagctccgacgacaacggtgatgatattaattcagatagtggtcaagaggatggttattaatcgtttattagttaatggcttagccgtataaactaaagtatttagatcatcagatcaatccactctttaaagccgttaggcctactagtagggtaagccttgtattttaagtaaatagcctatttcccagagattctatagtcgcctatttagcaaattttctattatttccgataacccgctgctttacatatgtatctattatatatatcattctagtagttatactttgcattcctataggagccagcttaattagaacttgctgttattacaataagggctattaaaggagacggctaaaagtactttttaattagtatcatccgatattatatctctctactttatatctattaattttactaacaattttggccctcgaaagatataatatatagtagatttatagaattgaatatatttaaagatatcgcgtactgaaatgtatattattatactaaaatctgtgcttaaaggtatatagtctacagtatagctgtctatatatccttctagtcgctaaacctaagtataaagacccgtatatccctacggccaattaacatatgtattttcctagtatcatatcataagcgctaaggtgatccgagtagtattagaataaatatagagtaggccagcgctataaaacagcctattatttataatcagaaagggatctgagctttagtatatatataaaatcaaattatagcctatctcagatataggtatggctagacactaggcgtactgctagtcataatgaaggatataggacgcgtctaagactaagataggtaaggataagctaggctgcaatttcctattaggtactaaagctcataatatagttactcctaaaatgaccgattatctataacatttaggtcattttatataccttaaatcatataattaacctaaactcaagagcggtattcagtttatcgtcccactcagcctaactttaattctaaataccataccccaagagcaccttccttataggctaaatactactaggtcacatctattttatatacttcgtatggttattagagtttagggttacctagcttaattctcttccaataaaatagatctcctaggtactcgtttaatatttcatagtacttactagataatcaggttttttacctatcggaattttcccgatagtaatttcgatagttaagagttagagcctctagataaagaggcttaataagaataagcaccttttttaagtggtctatagtactttatttatagcagcggcggaactcaagttaaacctatagtatataaatcacgcgggagggccgccttacgcacagtaacttgacaatttattatgtgacttcgtttccctttctcgtcctatatggtataagctagttattacctctaaaggggttctaggtattcgcagaagcatctgcgcccctcaaccctaagtaggctagagatagactttaataaccccgataatcctagactcctagcagttactatcctattaatatcttcctataattttatactatattaccgcctctaagagaagcgaactaacgtagtgctattatatctaatagattatatccaggatacacgtggtttctattagcgccaaggtattatagagtggtgaacttagtacctaccagacaggtaaggctactagttacagcaagcatataattaccgggattctacctaatctatagctttaatagtattaaataatagcctagagtgcagtctatatagataatcctataggtagctaaattatcactttatactttacatttagtattattattagtattacctatagggtccttttacctatctcttccttttctaatctcctattcggtaaataagagtcctacagggatatctaaaggttctatacaaactagacaaagagtatatataaggtaaggctagattatacaagtatgtattgtctaaacctatacggggtaatatataggacttatactgattaaatatctcgagggacttaatctaaatcttatttaccttagctattataatattactaactaagtaaagtaacaataggttctatttggatcgcagatatatctcgcctagagttgacagatattaagaagatccggccatctatcacgaatgtagagcatttgtcttcttataattagatcgaatcgtctagccctactattactatccctagctgcctacctctgtggtctctactctaaacccctaaaaaagtggctaaagactttaggctcatttatattgcttaaaacgcgtttcgctatcctgaaagtccgcttgaaccactttttcgcttactgtacactaaaaagcctttatataatatatatcaagttgacttaataactgatcgaaataacgtccgcaaacttctgtcgttcgttaatccaaatctctctagaaatggactagaacctttcactattaaaattaagaccacaagcaatacagcaatattttgccaggtagaaaccgaaatatatatatttatcgggccataccacttcagaggctatggtcacgagtttgagaaagcgttcataaatacctaagtatccggcagcactagatatcatcggattatctcctataacttaggcgatttgaaattcatagtacactacgagactgacgcttatattgaagaagctgcaaatcttcaatcttaaggtatgggttcggaaaataagaattttctgaatatgatggaaaatctatctctttcgcgacccgaaacttactctcgtcttattaccgagtccaaattagtggtttagaaaaaaggaaaatctgtcctaattaatttaacccttaagatcaaaacacaagtgtcctataagccgtttaatatctaagaagttcttccacagctataggtgttataaatacccaaccttatccatgcctaccacaatggtagtacatttagactgccggaggttaaagatgtcactcgtgagattgctgaataggaacgaaactatactaataacctttagagattggttgtattagtcaagggaatcattagagtagtaagagagaatggtaggaatactgtcataaaatataacggtcgaagtgacagccttacagttttaaagagagaagggagtaggatattacctgatgatctttatttgaaacttagcgacaaaataggttcgactaaagcggttaaatcaaattctcacaaaacaatactcgaaattagggatactttctataatattaatatctcgacgatactatatttatcagcctttgttagcttttaatatctttcccagccacaaaaaactgaattcatttatagtaatattgctttatttaacattgctctcaggggcttagaatcaggctatcggcaatattttcgctctttataaggcgatatcccttaatattacactctctgtgaaacatatgatttcctcggggttaacgtacttaccaggcagtcaattaataatatttttgctgatttaagggcctgtaaaaccgattataaactcgggtataagcgttattaagctgtaaggggcgataaatctcgagtataggacgcggcatttcgacttctatttctaataatatacagcgaattcagcgataaaaaaaaagatcctaccaaggtttacaacgccgtgctatttattgtctcgtatccaggtaccttcaaacagggcacgagaattgcaatacagtcggtctttgaggagcgctttgtcgtgtccgcgaagcaacgaagccaattggatcgtcggtaaaaggagaatactaccaactcgtcaggcgatgagaacacaacagaggatgaatctaataagccatacctttctaaccagtcttaggctaacaaaatttatgagaatggtttctttagctaggttgctaggtatctttggaagctatagtagtgtatctaggatttattttctaggtattaagtctaatgagcgggaggtcaaacgtaccttcaagtatgaattcttctgcagagttctcttctttttgtaccgatattagtagttttcgtatccaattatacctttatactcttacgacttaattctaggagaataaatccgacggtctcgtgactcttaattagatggttaataaagccactgtatttcagaccgctttctagactagtagtggtatcttacaatatattgtagttcagaggtatattaattgtgttttattctagagaaaaagatgaggttatatatacaacacggagcccagttgattataaatcaacttagttatctatatagacatttcggagctaattccgataaagcggcttgcttcctaatctgtaccagagtcttctttcgaacgtgacttgtcaatagcttcagctgcacattcgatttcgtatattatcgagggtctccacttaagataataatagatactatagtccattttaacagttattatcgcgatttagcacttctggttttaatttaggatcgcgatttatatagaaaaatctagactattcatggcaaacaacacagcgtatatattgctgggaaactatataagtacttatatgccgaaatcttatcccgatacttatattattaccagtaatattacactctcgcatataatagtttctagaataattaaatctatcagtagcactcacttaagtgctactagtccggtaagtcccgtggctatcggagactaaccagattaagggctcccagctaggtgcccctaagtcggttagcgctcttcgcaggtaataagattctttacgtgatcagaggacagatagatcggttagctgttattagttacagccctgtatttaattggcgactaaggcctctagtcccacgcagtgtggtctctagtatgacagaccctgtcggacgagtgagggccatgccctccgttccccagctaatccaaatcggctttatatatacagcgggccgccgtttaagataattaattaacccatctattcctcctcttctaccgtttttctatctctcatagaaacataatctaatctctttatcctaaataatgaccgaagacacgatcgccgttacttgaatatttccttatttttatttcagttcggtcttttcttactacaggaggatcttgatatccgttaccactatttgtagtaataccaatttaaattaatcttctatttttagtcctaggagctggctggggtttagcgtgaccatagtaccacagagtaccgtggagttctcgggcagtcgaatatacaacaaatttcaatgagtatatatttttcggtctctcagtatacagttgtggaagaaaatattacctaggtacataagcccttaaatcgactagcccagggctccctacttcacttttgagttggttgtatctataaaaggtagccatgaaaggtagccattttggataggcttattagcagaaggcactctagacaaagagaataccattgacgttagatatataattaagggactcttattctagtggcctactttaagttaggaggttcattaaagatcttcttatatatctcagtaagaatgcgagtatcggcgcgaaaggttggagatatgttttcgctttaaataagaaagcctatagtgcggacgaggaggcgcttaagttactctagctcgataagctcctttagacctaatataaaacttgcagatagaacgagtatattgccgaattgcctataaagaaaacatataagtctttcctctatattcgtgatttttaagactagggccagaggatcccttacatataggcagtcccgaagatattggtaacgaccaaccgatatcctcctactctatcaaatgcctccgtgctcttaatagccgaactaatgcagatatagtatatagattttagcttcttcggcagctcatgtaatcggaccttaggtggctgctagttagtagagattacagccggcgtagagcctatatcactcgatatactcggagcgcgagcggagctgtgtagtatagaggggggtaattgttggaatacaggtgattccattaaattctggctaattggaccggcgcgagtacctatatggccgtagtgcagtatataatagagaaggggtcggtagataatataccgggtactataatacttagcacacatacaggcagcgttgatttcgtttactggcggatcactttcgtcctattacatactattaggtagactttcacgctagcggtcgaggtttaggctaagagcttcttaaacggtaaacgaccattgtatctagtcttacttttcaaccttatataagtctgtatatactcgatttaagattttgcgtagatggatttgggtagaataaaacagtattattatcgtctctggtacagtgagattatttggtagaaacatcgtctattttcctttcggaataggtatctaaccttccgaacgggagatattactcgctggaatatcgagctctacaagaaggtcactctccaattgcagataggtctagtacacaaaattgtacaagtccttcatagctcccttattaagttgcctataccgcttagttcttataagaatctagtaagccctcaatgcctaagaaatctaactgtggctctggaaagggtaggccaactggcctatataaagtccagcaagtaagccgcactgaatatattctagcttatttctaccctgcagatggcctagtattacagttatatatctatagagagttaatctagggatagcctagtagttccttgtattcccttatttatcctgtgtatttgtgatatctctccttaataagccttctatatgattgttggatgaactgtttaggaaagcttggccgataggctgggctggtacactatagagaggattcgaaagcgacgtctgtacggccgctaagccagagtttacagagggaagcataccattagtatccgtgacgtatatcgtaattgcaggcagcggagaattgaatggtgccagcggagcagggatatattggttgaggtagtcaatcttcttatctataacaggcctagggagaggggcaggagcttcgcaaatggccccgagggctaggtatagcaggattaaggcagtgttaatgtttttaccgactcgtggccgtagcaggttggagacaggctctaataactcgccgcgcacactcaggttttcatttgactgcctctttttggctagaggcggactattacgagccggttgagcgtagctggaaacagagcttggtggtgagttattgactcgataatagctttcgataaagttatcgaccttaatcccaagttcaccttccataaggaatgggtagagcttgaacatatgcttgaagtagctatcatagtagcgcctagcagtcgtagcatccagatccaagtttccaaattcgtcgatgtcaatattgacgtgctgtcctgcaccgttcacaccgggttgagcacctttagactcgcaatccattggtaattgactgttatcggcagtgtatgagatctcgccttggccgtatatactgatgagactgtgctcttcttccaaccgcatgacatagtcctcatcatatctttcagggtgtatcagcctcttgattgacagccacattaatagcttgtgagctgcagtggtgtgctctactgggatggagagctctccctcggcctccttctaatgcgttcaattatgttctttctaaattcaaaagtgattcctgtgtggacgaggccgtgcctagtgatattgctatctacgcgaagaaaaattatctttataaatacatcatttccgttccgtgtaaagctgtcatgtggagaatgttcgtatcaaatagtgtatgcggcctttttcgcaaatgccggcaagtcagctcttcaaatccaagcttctggcggtacctggggtccacggctccaagctgttggccaaatttcgaaccgctcacatcctgggtctgaggcatcgctgctttgagaggtgagtcctgcctgatgactggtgatggtgggagggccggatgttcttgcacagtcggatgtgtatgtctaacctcttcagctaggttgaaacccacttgctcttgcatttgatcttgccattttgcaaaatgctcatcgatgcggttggctcgctcctccatgcgagtctctatctgggagagtcgatccaataccagctgagtagtcttctcttctttgtgcaacggcacctctttgtagacacagccaaggttgtttactttgcagtggctgcaacatggtcgtccctcgtcacactttgcttttcgagctcgacattgatcgcaagcctatatggttagagtgtacgtgggaaaatctcccgaaacaagccctccttctactagcttaacatacctgcgtagctcgatgtgccttcctttgaggtgctttaagcacctctctttcgtaagaaccctgactgtacccgacatggggcgtatcttttgccatttgggtaacacgaattgtggaatctgagacaggaggcagacttctcgaaacggataaatgttcagcgttgttgacccgatttaggagcgggtagcccatgtgagcgcgaaacccaggtgagccctcgtacggcgcgccctttgttgactgttggaagttttggtaaggaactggaacttgggcagaatctgtgggcgcaggtataggtaggccatgttcattcagtcgaccatacatgctttctgatggaacttcacggttacgcataaaggggtatcttggtcgctgcagcggactcataggcgcatggtgcccttccggagaggaaatgcgatccattgcaaatggagagtccaggtgtgtggaggtgtttgaagctgccaggtacggccgttttgttgtattgttgcaactaaccagggcccttgacatggggtatgtcttgggcgtttactgttgcgaattaatctctcttcgtaaattgggactcaaaccgacgtgacacttttggttggaatcagaaaagatatagtcaatgagaggaaatcagtggattagttgtgggtgtaaactcggcaggagtctctttcctgaccaggtggtccgaggcttccttcctcacatccttggctacactggctgggctttactactggtgggtgccatccctggctgcttagccaattaccatacccgtaggtacgggggttgatcccgctatatgaaccgcacattctccatccacactttatttgctgcacaagctcgcaacaattgtcaatgtgacaggttgaaatatgaactggtagcttgctatggagcgggggatcctagctttgagggcgtgcccggtagggcatggtttaaattttgtaccacccttagtgaccatgaaatcgaccaagaatagttgataataagcggcgaagccgagaatcaaccccaaaaagacatttccagttcttaaccaaagtcactttaattccagtatggagaacaactcaaagcggaagtattgctatcgtggattggatgtaggtaaacgttttggcggtcgtgttgttttgggaacccatccccgggaggagggtataaaatctgaaccataccgtatagggaaatctcccaatgccagaatcacttgccccttttgtgagctacagattccagttcatcagttttacatgaccataattcattgagtgtttttcacgaatagcaatggaagggaaatccgggtttcctgggaagtatctaacggtggccaactaccattggacagcttggaggggattcgcttcatatcgagggtagtcctgtctgatccattgaacttgccgatcgtaacatatatttgactccgaaagttcatatcccttgtgatatcccctcccagaatgatcaacccgactggctccagcatccgcgttccattccgcaccattctcgaccatcccataacacagcaatactaacttgaggcccccaatcggatccacgggctcatacgtagaatccttcgcggagcttaaggctctgaattacatatattcactctttctgccgcagaaatattccaaaaactcgtccctactcatatcgccgttcacaaacttggcgcccgggctaatattgccgtagcctgcgcgaacgggggccttctcttctgcgccatcttgtgtatttcgatcctataaggatgagtaccttgatgggacaggtaaataatccgggaaacgttaacatacggtgccgacgccctcgtcgggcgattcaggtcccccaagaaccggtgtactgtccatctgcttcgcccgttctctaggtttgaacaccgtcgatgtatttctgtcgtttaaacttgatctgtcgtcgaaggtacaatgggatcgaacgtatggtggtgtggcctatgggccttgctattagaggtcacatttgtggaaagtattaattgtgagccgtggaagtacctgaattggttttgtccttatcgactgattaaccttagagactggataagaagactagcgatattacctctcagtaagtaactctacacgactgacaatgatagatctggcagggccatactctatgatcctgatttggtagcgattgcgcggtcccttccctaggttttggtgcctcccgatcggagtgttgattagtccgatgaggcaactctttctttaagtaagtgatagccataatatggatagtgctctctgaaacgagaatagtctgagtatttagcgctgataccgtttaacggaagaattatgaagaaggtggaggtgaaaggagaccagccccttttggatctagtttagcactataataatccaccggtgtgacgtaataacattgtcatgaaactttcagtaaatttactgggtgggcctatatggaaagagctagctgctggggcgtcaatatgaccgtcagcgtaaaagactcaggccgatgcctacgggccttccagctatcgggagccagtggccaataatggctaagccatcatgcgctcaccctaaataaacgaatgatggatctaacgaataaattgtatctatggtgcgattctaaacaagaaatgaggtggactcgggaaggtgaaagtaacaattttcctacctgtggcatttattgcgtatgctagactccaaccgtaagggtggtatacctaccgtttgtatgcacacagaaacagctactaaactggccaggtcatagtgggctaaggaggtgggtaaagagaaggttcagattaaaaactgaggtcggtctgggtcacatcggaataacgacgtgaggcaagagcgcctatcatgatctactagacccttgcaagcctggttcctagaatccttccgcgaggtaaatgtagccaatgcgtgctcaaagccataagccagatttgtgtcatgtataggaaaacagactaccccttgggatctgcgcgcgcattctgcccttaaggtagcaagcaaccttattcctacttattaagcctgctctatgaacctctataagggtaactcaaccttatgagctactgacattttaggttggttcgttattgtagcattatgtcttatgcgcgaaacccatttaatgtcactggcttcgtgttcacggaagtcccaataaactattccattggcccgacatataatccactaccttcggagataggttcaggaagttctctccatccgagcgttctacaatcggaaagctggttaataggatctgtgtcttcaaccgtgactccctctccccggtcaagttcgtcatatcgagaaataagacctcggccagcaccagcattgcctcaaccggaaaccaaaaatgaagagaagcaacgagtccggaggcctaccaaaaagacatgtcgaagggtatatgggcttactggcacgcctaaccaaccagcccggcgtaatgaaacgaggtctgcatggctggttccccgaacattcgtcacattggctaagtaggctctttcagcgcagcaaaaacaccggccatgacgagtcacgattcagccactcagccccagagctctcgctcatgcgattaccctccatataatcaagaaagccctccccaagcttccgtcgaggctctctagaaagccttgaaggcttaagtcttacactcactcagggttttgcgcaagattgctatggaccaccaagcacttaacctggtccctgagataatagatggttgggtggcggatattgaaggagttgatgcaaaaaatatcccaattgcatccagcatggcggcgcagatgtctgttccgttcgaacgatttaccattctcacgaaatgcatcacagctacgggcccgatgcaacagcttactatcaggcaccaggcaaccgagttgctgaaatatatattgacttatgcggaggagtactacttagtccagggttcacaggtctatcttgatattggtagatggatagaaagactcaccaagacaaacatgaggaagtgaaatgttattatccagagggtctggaatattccattgctctttctatggaattatgtgtaggatgttatcttcttcttgtaccagatcccttttcaatattatgggaatatgttctgtaatgtcacatatccgagagtcccagtgccgctatccccgtattagaccggtgaaagcttctgtcctttccctgagatgggtgtcaagggagtattccaatgttttaccgattgctcacctcggtacttccatcgtcctttgcgacacagaatgaatatcatcatgtccagctagtattattccagtgttatgggtgtcttgttggttccatcattgtggtcgctagctggttgggatgcacgggtgcgttgagaagtttcttgtaaaaccgatccctaaggcctcctctgggctttgggaactggagtataattgctccataggtgcatcattggtacctcttcatcatgtggcacacgggattggaccgattctttgacggaaagatcctgcaggaaaaacgtaaatcattagcctatggcttccactgcgaataatgattccgaggttcaacagagggtttgtgttactacctctatgaaaatcctgttattgcatccgtggctttttgaaacggccgcctcctgtttgtttgaccaaaatcgacagcggatagggaacaaatcttcgtctacaaaaagtcatcagcaagccctaaagttgtgcgactgggcctacaaccactgaatggatgtgggaaaggggaaggggaaaggggatgctggagggggaggcgcggtgaataggaagccgacatttcttgggcacatcttcgatctagacgggatgcttaatctattaacccacggtgagccatttgtcagtatttcattctcttgctgcacggtgaagatgcagtagcataagagtatctgagaagttgcgttgctcacttgcctgtgatattattcgtgcacggccgttgatgggaaatgtcaaaaagggctttcgattatgtatttgtctgcccgtataaacaaattagttcaatttcctctagttggatacctgttgttgagtcctgggtgcgaggcgtgagcttgaggagtgaagagatgaaccgctgactgtcagttttaggtaagtcagactcacctaggccacctactttccacccttcctagagcatccgaccatcctagccctgcttgcctcatgccaccattagtcctcctaccatcagatacaatccatccccggttgcaatgtcacttctgcacagtttctcttctgctatgctcaaacttactgaatcatccaacttccccccgactaaagctcttcgcacctgagtcggaaacgtcttagccatcaagatatgacatcttactccgaactttggctggactggtttggaatttatcgtttgattgcaatttgctggtccaaatgataattgtcaggcccatcgaactactgacctctcccatctatctcttagtcaaacgatcgcttgtctttgctcgaccaagatgccgtatagcacaagggtcagcacactaccccaatgttatatgcttcgaacaaagggatcctctacacgactggtgagatggtttggtgtgtcttgaaggcgctagtcagacctccggccagaagccctgcggctccagtgggagattgctcgcgcgcgttgctgatccaagataagttgaggtaagccccctctgtttaatctgtcacatatcgtaccatactctgactctatctcttctgctcaaaaggatgtcgctgaataccctcagctggaatctacgcctatccaatcttcaatcacggtctatgattcttgcccgcagaatatccataccccacaaagcccgttcctttatcctcctactgcgctgggtggtagagccactccgcgatgatacgactgaaaaatcgaaggggagggcgaagggctaaatcgccaacctctcgaaacacgtcattccagaggttgatcttccaaggtccaccgtggacttagctaactatggtactatgggagaagtaccctatcacacactgcacgaagatggtaacaaaagcattgacggggaagctgaagagtttattccatggctaaaccgagatttgggcagagccacagatatccgacatgttgctggtaagccagaaagcacattttctcatgtcgatattgtcaactccttcaaatgtgcatcccgaggcattcctctgacctgactgctttggttttcatatctctcttctccatatcaccatttgacttatgtgaccttgctgacggagttttagttaggcacttcatagctgtcagtccgggttaggccgatagctatcctgggttagggataaatgccataaattgaatactacccgactgtgcggctagatgatgcaattatctgccatatactgaaaactaggatatttcttcggaacgcaaaagacccgaagacagaatattgtgttcttatggtgagcggaaatcatcacaacaaggacaagtttcaatttgctacaacatctccctatgctgagctgactttgcatcctcacccacctcatgttcctgacgctagggccgaccatgaggtacacgcttcacacactctctcgtccagcaacgctatattccagaaaacttgacttcactatcaatcgattgatccccagtgtagattttctgtgacacattttattggcgccacgaagatctgccgcatttttgcacctctcaaggaagcgctcactggccgcagtgcgaggtacagtactgcagggataaggaattaggtggacacctggccatggtcctcacgctgggagctggttgtagtttggaacagccgaaatagcgactgttccaccgactcgccgcgctgtttaaactcgcgaatatgaggctggaggaacggaataccgggatgctgattgtagcgctggcggtatgaaacgaaattgtggctcgggtctatgagaggcaggattttgggcggtatcaaatgggcaggagtaacagtacgactggcggcgaaatcacggaatatattagatccgatcgcaatatatttgcgaaggccgtctagtatagccattagagaataatagttccgtgcttcataaagctcctgtgagaaaacaaattaagcttcagtttcttggtatgttcaatagttggagtcctcaccaatgtacaggcctgaaggtacggaactaggtgtggcagtccagagcagcattccaacacagaattgcttagcctttgccaatagatgagggcctccgaaagcatagcatcctcttctatatgtgttcctcgtgacagcccatcaaataaacacttatccgtctgcgtcaaggcccctgcgaaatcggtcgctgatgaagaaaggcagtcttccaacaaaggaagagaagtttcgaagggctcgaaccaattcatctggtcagagtgtctgtatgctttctggaaacgtacagcaaggacactgagaaccttgaatatagttgataggctggaggaatggtttttgaacagttgctgaattggggctgcgatgaatgcaaatcctggggtatcatgcgaaggcatatcgtgcttgccctctggctgaatggccatgatacactgggaaaaggcgtgatgtgcaaacggacttcgagcccgaagatgctatgtgaaccaattagctagtttcccttgatcttggtctttctttgtgggcttaatggatcacccaccttctctattttcagataaagcaaaagttcctccgggtacatgcgtagatgatctacaagaagagcatataacgaagtatgctgctgcaagaaccactctactgacacggctttgtatccaagagcggagcgtacgatatcctcaaaagcgatctgctggaaatgaaaataactctctgcctcaatttctagagcgattgatctggggtccgatgaaccccctgatatagtgggaatccagttccatgtaagtaatggacgttgcgggatactagatcgaagcaggatctcttccactttctgcagatgtggcaactctgataggcggcaatgatcgtacggctttgacgccgcaaagaggcattcattgatgaactgcatattacgactcagcagtgagcttcgcggagaagattcgtcgtggaatagcccaaatcggatcgcttgactgatatcattgaaatcgtaagcccatagcatattgattgcctcatcttcccaccatcgatatgcgacgcaaaattgaggaatcgccacactaggacgaaagacaaacgggaatggccccatatccacgggaggagcgctgcttgttgggttttgcatcatttgagacaaagtcggcagcactgagttggtgatatcctggaggtgggggatatgtcggcagacccaggacagagagagttccatccatctatctaaattttaatttaccgctagtcaccttctgtgtaggagtggtctgtatcggaaataccgtcgacgaccacacttgggcctggttgtagcgttttgacaatatggcgagacgggagggggacggggagttagccaaggcaaagcccacgccccaaagttagctagcatgccgtgttgaaccaatattccaaatagttgccctcatatctggttcccattagcacattggggatggtatgaaatctgaaccatacccgattgggaatatcctccaagccagaattcctccgccccttgcgacctttgatttttctcaagcaccataattccttgcatctgggtttcacgtattataatagaagggaaactcaagattgttggataggtattttgcccgcagcatgtcgagatctaggaccgatacgctttgcccgccccacgaggggtgttatcaagtgacttgcaggcctatgtgaaaaccgaaaatttgtaccaactgtgtgcctgtatctaaattgacaagtgggtttagtccgcgcctaaggaatgtaggatttcatgtggagttgatagggttgtgttattcctggtgtagaccatggagatgctggtgagaaaaacatggatattagggggctcaacggttagttactaaaaccaacgaatgggaaaagcggcccacgtattattatgttgagattgtcaaggcattcatgttgttgagcattttgggtcccactgttattgttataaggcctcttaaagtgaatatcttgacaccatttggatcataaggtagcctgtatttccgcacattttggaagcatagccattacgtcattcaacatgtcagggaatcattcatacaaagtcaacgttagtggcacgctcatgggaaataatggctgatttctctgcgggcggtcgattttgagataccctctgttattgtaaaagctctggggcagtggctacttcatcaacccagggaagatcttcgaaggtatccgcaaacatgaacactagacctggaatgcactttctttgtcctggattgaatatcgctacccagggcttaatcttggctaacgtggtgatcaacgcgcatgcaaattacgatgttgaagtatatcaaagcagccctcagggtgctgatggtcagtttggttaatttagatctcacttcctctagcgagggccatgacatatgcctccatgtggatcattcaagcggttcttctttttctagcttttaaaacacgtagacttccgcgagcatcatcacagctagcgctaggccgcttcctcagccatactttcccaaagcaccggggctagaaatttacacagtcatgcgaacatctccttttgaaagacctcgtaatggcgctaagtgggctccatttggctcgtaattggatgcaagcaggggttggtatgtgaccttgtaatattgaaccttgggttatgcactagactggttgcgttggaaaagacatgttctgtaggcggagcgaatgttcgggccaaagattcgaggtcgatccgggcaacatcggaacatccggtttaggcaaaagccctcctatcggatatccactggccccttacgagattgtcccccgatgtctcacttgcgatgggcacatttaataccgcattacaagccagaaggaagaatctatttcctgcgaaagaacacagataacgccttcgaattctttcgacgtgaaggcagaatataaactacttcctactcgtcaggtgtgttgcgtggaattgctcacaggtaaccaaactcttggcctacttggggaatcaagactctaaccaaacttatgattgcgacagtatgtaccatgacggaaactcatccagtgggagctcaacctacccactcgtgggagtcccaatagactacccgtatggcctgacacccgctccgttgatggactcggctcctgcagtagaccaagcgagtgatgtttgttggagctttgagcaagcacaaaactggacgataacacgtgcgtcgccaacagtcacactgtctcccctccctatttcgagatatcgagagataagacctcgaccgctgcacgaatcagcgtccactttgcctccggtgcagcctggcaaagaagaacagcacagccagtaccggaaattggggagaagaaagcactcgaagagccacagacagtcagatcaaggatacctcaagaagacagccaggagcgcgattcgaacggcatctgaggttacggatacgaccaagaagcaagtgagagttggcagaatgaggtatgtacggctgcactctctaactggtaacccgggaaatggctaagtcgcctattacagcagagcgaaacccccgaaagctccagggggagattcagccacacaaggcccacgccgtcggtcgcctgattgctcttcaaatcatccggaggatagcccccaagcttcagtaggggctcttcagagagccttgaaggcccaggtattacaatcactcgaggttttgcgtgagatcgccaaggagttccgcgccttcaacttggggcttgagacgattgatgactgggtggcagagatcaaggaagttgacgaaacattgatccccgtcccatcaagcaccgcggtcttacaggtacatgttcctttcgaaaagctaagctttatcctcacgaaatgtattacagcttcaggacgcatgcgagactttattgtcagggaccaggcactggagttgttgaaatatatacagacctatgcggaggagtatcacctgtttaaaaacctgcgggtccatcttgacattggtaggtatatagaaagactcagccaaggcaaagataatgagatgggcaaatgatgttgttctcccgggaggtcgcgcatagtcttttgctgtataccagtcattttctgcctaatttgcttcaaaattgagaagatctctctggagtgttcattgcatgtcacatactgaagatgcttaatgccgttctgtcagtaatgaagactctaccgcagccattctgctgttccagaccttcccaccacctgccttttgatgtacaggatacatatcgcgcagtccaacaactctaggcccaggagcatgcttgtatataattgctccgtcgtggctgcccgcaatctttgggaatgcggaggccttcaaccttgctttcgcatcccaaatactaccatgccgatgaacatgagtatacttgttgctcggtttcgttgttcgtatggtagagggtctgttaagccggtccgattcgctcacgtaaataacctgctagaattccaagaccattagctcgaggctttcactttaggtacgcactgagagactcgacagactggtttcgttatgtcttcattggacaggttccacctcatctggcgctcggtatagggccctcttgtgcacgtttggcaattgggtagaaagacatctcgtcgtgtacagataataagtccggcaaagcttggagatatgtaagaaatggcaagcaagactcggggaataataggaagagaacgtgccttgagagttttcactcaccgtcaatcaagaaaattcttgatttcctcctccacagcaagccttgtatcaggattatatttgctggctgtacaggcaagtcgtagtagcctaaaaggatcccagaagttcctcgcttgcataggatgtggtccgtggacggcagatgctgaatggtgctttctgttagcatgtggactcttcaaaggaacaaaaggtctcgatctgttagggttgtgataagttgttgaatactccagggaatgcgaggaaggaaggtcggggaaaggagaaatgtatcactgactgtctgttttaggtaaggcagatttgggtcctctgccctccaccttaccctgacgcgagcacctgagtattctggccttccttgtctccttccaccaccagttccccctaattagataaaatccatgcccgtgttacaatttcactttctctcggtatccttcccggtaagtgcgaactcaccgaatcctccaaacctgtacctaccaagggtcttcgggctcaagcctgaaggctacccacctcgatcctttgctaccaaacgttcctaaggctgattcgaatcgcaatctagtattgtactaccctagttcgaacaatagcaatcttcagaccgaccagactcctgcctcccccatccatccttccgtcacacgaacgtcgcgcatgattgctcgactttgttcgaccaaactcctgtataaggctagtttcagcacacgatatcaacataccgttctttacttctccaccaccggtgcggattattgcgtgagctctaagggctagtctgaccaggtcagaagcgcagcgaccgcggcgtaacaactctcgagcatttttgctttaaggtgagacgtcggaacaagctgtcgcatactggacactggttccatctcttcttatcaaaagacagtccctaaatacccttggccgaatgctacactagtcaaacctgccaggtgcgtatggccgtttatgagatgtcctcgcagcaaacgaccgctagtaacgacttcacacagggagacaatagacgataaacgctttaaacttgtctggagcctagggataattcgtcttcatgttaggcaaaaattacagacagtcttagattgtgataagaggtgggaaattcatacattcagtttccggaacaagctcaaacaattgagcttatattaatcgccggagtaacatatatatagggcattcagacacgactaagcccatcctctgtcctcttactcaatccgggtcacctgctcgttttgcgtacttgcctgtcatttggcagtggtttctcgatgacacaacggagaaactggaagaccctaacatcggctgccttgcaaacgccctattttgccggattttccttccatgacttaacaactctgatacggcaagattattgatgatacgaaggatggtctacattgcatatcatgcagaaaccatgttttctttcaacaatctggataatctatgctttgctgatactaaagacaatgacagcggaatcatgccactggatatggaacaagaatacgttaatgattttgatgctgaccgggagatcttgggaggcggctcctaattttggtacatatctggtgtcctgcagtctgctttaaagtatattagagcaacacagagacagctgcatgaacctttgtttcccataaagactacttccgtttcccagaaaattctcttaagaatgtttctgtatccatccctccgtgaacacaaaaggttcgtccagtgttggaattatggaagaccatcgtatcatccatagaacctgcacatccggtaatcaccatgcttgcgccatcaaaagtgcagtctttgaagatatacgtcctttgctttcttttattgatatcggttggttcctcacgagggaagacggtggctgatgcaagtcaatacccgagtcatattctcaaatgacgcatcatagatacctgagtgtctctgttcatcagaactggaatgacgatgactggatagctttccttcgtgcttgaatggttgcttgagtggaaaggaagaagggttagtaaaagctgctgtaagagcgaaggcactctcgcccgagctttagtttcagacttacctgatcccgaatacacttcatggatgtcgacattggctttctggtatcatcctgatagctttggggctggggcttgtagatctgttagaaacagtaatctctggaaaaggaaagcctagcgcaagggtatgataccaattctattctctccagatgtggccgggtagacccattgagccatgtcgaagtatcatctgaatcggggttgccttgagataatgcaccttgacagccgcctttcaaccatctgatggtcatcttggaagttggggctttccagaaatatcgtaaagaccccctggaatgagacaatgaagtgaagtcagaatgtgagggggaacggatcagccatgacctagacggtaaattacccctagtaatgtctacgtactgtatggcttggcactccatgccctaaatgatggtaatatttctccgtaggtatccagcgttggcacatatgccatacggctggccgtggaaagaagtgcggatgtatcaggttgagggagggccctgggaagatcagccactaaggccttttttatggtagcggtataattcagaccttgaccccgacatcagctgcgcctacctcggaccaagtacagtatcatagtttggttcacctactcttgcgtccaatggaaatgagagcatgagaggaagagtagttagaggaccacgctagtacaatggcccgagagtgagaagaagcgccacaaccctttccccaaacccctcgataaacctactcccaggaaaaatgcgacgatcatttctattactacccaccataaatatattgttcattatgaaagaagaacctgaggtggtgttgtccccaaatacttggggaagctcccgggtccatcggaaaacctgcactctggatcaaatgggtacttgaaatcaggtcacattcggtcaggagactacagtaacacaagctcatgtgcctcaccacattacatttcggataacccccagtggtggacgacatattctcgaggcttgctatcaaaaatacgacttcatctacaaagacctccgtcagcaacctttttggcagcaccacacgcgccctcccgctttcctccaacttcgcccctccaatatcacgcgaaatgacctgcacccaataaatacggacccactgcggaaggcgccgaggagacactgcactgcaatataagtcttggaaacgtcgaataagtgaaatgtcctggaagagccaacggctaccacaagtgcgaggtggtgattcaaagtcggcccagctaggggcggtgtcaacatggtcttttcagctagatccgggagagaagggcagtatttccgagttgcttggtatgtactgtaattctgacacaacgaccataatatcagctccatccttcagcaaaatacggattccgacctcgtctttagcagtcaagaaccttcctttgccgcttgaccattcccaccttcaagcaacctcgcaagtccggcgatgaatcgcgcgctccaaatgggccactgatgctgttgaagcgcttttttccctttggccaacccatcgccacgacgtgcagtcctccttttatttgcacaataaccagttcacatgtacgagtgcggccctgagttagcggtacgtaaatttcaacagaggcagtttatatttgtttcgccgcacatgttgaaatagcccaagttctgtagtcactgagcattgtatagggttacccggtgaatggccttcgatccatgaaaggcaaggcctcaaggttcagagatggattttggatcataagcgccaccgtgtcgccgtcattgtccgaatgaggaacgacagctcgaacagctgcggtcacgacatagtttgtatgaatgatataacacgaatcgctcccgaggcccagggttctcctaccactaatagctgatattaatataaggatccccatcactgccatgctatagcaccatgcaaaatcgctggataccaattatagcaatacttttccaggtaaagtgatctatagacatgaaccattagatctattgccttctcacgttagatgaagttggatgcgtatacaatatgagtatgaacgctatatattattgaacgagaagtctttagctctgttgcctcctcataaaccaaccattcatggcccaacactaggaatcctgcccagaattttcatcatatttggaccaagagcgcattgtgttcaaatctttgagccattcttgcctgaggatcacgtgtttgtgccagataaacagctttttctcttccttggatattgtgcgggatggggacattgtttccttgcactaatgagcggaagaaaaatcttgcatatccgaaattgaaagctgcttttggttctgcgaatttgaactcttagatcgactatgttcctagaaaagggactcgtcactcactggtgagtaaactttgatcactgttggagggctgaacggtaaatcgcctgagggagaggtgaaaagcagcccacgcagtacgattaccagggcgttcaaatctgttcagaatgttgaggattttggggactcttattgtacggtctctgatgttccgtagacacgatttgcattagaaccatcataaaggtgcccggtatcgacgcacttttgtgcattctaccctctcgcatcattgattatctcagggctatatagccaacgcaaaattcttcatgcaatattgccgctccctgcacgctcatggccaactgtccaataaagttgcaagccgccccgcttatacatgctccttgagaaattgcccagctttagccggcagtatgttccaagaacgtgacaaacatctcctcctactttcgccggctcagcctttgccgcagcttgaccagcatgatggcccaagtctcccaaaggtcaacccgctgaccccacctgccactcctgtccctaattgggactcacgagtccttccaagctggcccgacgcgggtcacggcatatggatgcccaataaacgcgatactacatctctagaacgcgaataccgggtagaccatggggtaatccaggcctaccactgtttcccaggttctcattaccatgcaccaatgccgctaagggaccatggcatgcccagtctctgtctctctcaaaaaacagacggttcacttgagtcgacctccataccttacttgccaacattggtaccctgccacttgagacaaatcgactcatccccaatgtccaatgtagttgaacgtgcgccgggggctggttcctcgacaatgcaaactgtcaaccctgcgttggtatttccagcttcggcaactgcttctgagaccttggatattacatcaagtctccccgcggcccccgaagttgggcccataccctcgggtaccggtatcgtctctacttggattcttgaccagccacaagagaagtcccaggtactccatggcaccactatgtgtgtaaatgaccattcgcttcttgactgtcacgttaatagcaggcagcataatcacaacttgaaccttgagaaccagcaatctgatatgcacgagcggaggttcaaatgcaaaatcgttggctgcagaatgggcttcaagcgtgaggaccacctcgagcgtcacacaaggagtcacttgaaagaaaagccatatgtttgctgggtgcctggatgccaccgtaccttttcacgccgcgacaatctcaaagtccattgtacgaagacacatacgagacgcggtggtcgcaaccgttatgttgctaccctcgacgaggcgagccccgactacgatccagagttccgtggccagctgtcatttgatggacgcccactcaggttcttagctcctattagctctgttcctgaagctaagcctctgcaaccgtgaatttgggcgataataaacatcaaggacatattttgccgacaacaagtaggcgggactaggtggccaaagtaaaccaccgtcatccaagctcagctgcttacgatgcgactagggaagaacctgcggcgcaatgccctgtccccctgtcaacaatcaagtttctcgtccattgtttctgcctaccggagagctttgtcgtcaaacatgccgaatgtatacaactttaggaaacacaacgatagccccaatagtgcaaaggtggcacctaaataataccactgcccctgccattcctggattcgtcaatttgtagattatcttcgggcaaattactggtcaagggagtgcagctcgtttaaaactgtttgacaacatatccgaggctcgtcaataatcacacatagttgcaatctgctccgtactataaatcaaggtactcggttaaaattctgatactacgtttgactaggttgtcttccatgatttttcggccatggctgctatattacatgacacattcctccgctagcgacctctcacgagcatctttcgatatccatcagcatggccaaatcaccccgagaggattgattccagaccttgagcacgctgatcagcctttcttgagtctgctctaaagcttcttccaaggaaaccagacgagatagctgctcatcaggacgaagctggaaaccgtcccgctgtttgttcaatttagtggcagcttccttcggaggtctgtcattttcgtctggtatctcgctctcggagtgtttcggctcacatgaggcccatagacgtcggaagagtcccacgggtcgagccgcttggaaggcgagtttcgggtcatcgcgatcgagatctgccagtgtctccaatatgggttgaaaatgctcgatcgtcagaggtttctttaggatttcttcctgctgctgcgagagaatgtagtgattagccacagtatagaaagtgtcatcgcttagcttacaagtgggggttcggagtcggaaacggcctgcggataggcctcatcactctccctaggcatttcactcggctgacggtctgccctatcttggtccggtagttgttctgaggaatccatcctgttcacttgcaaaatctcagcgcccaaaaacatataattaccagctggcgctggtctctcttatagccttcccagaatcaaacagttagttcaacactgtgacaaaggtggctagctcgtccaacacaaccatgacccgacacatgacagagacctccttgaacatctattttcaacgttcggacttgatataaccgatttctttctttggtcgactttctatttttcattgtaccatctgctcaccattggacgaaacctgagggacaaagaaagaaaaaaaaaaaggaattcctccgcttattgtatggtgactgtagtgatattaagaaattctcgaggccattacctccccatagttttgcaactgttgaatatcaataacctccgaaagcttaccgctagtaaggggtattccggagatacgtaatcctttcccacagctcttcgcactatttcacccactcgtctactcagaaactgcctcttgcatttgggctgtaggctgtttcttggtgctgtggagtgtggtcgttgagtcaacgttagtgcatcaaccgtttacaataacgtcctttcttcaccgaatgtgtcgcttaagccagtggaaatataatccagacatatgtacaggcctcacatttgttagtcaccctcacaaatatgcttttacacttgacgcccactagaagcttgcaaatagcaagacaagcgggaaggtctataactacctcttttacctatgtttttgctcaagacaactgcatgactgatccgcagccagcagatattatatccaaggcgtcagaatgattttgtcccaagttgattaaccgcgggcatcttaatatagtgggaaggtgagaagatgaatattgtagaggttaaaaaaacgcggaacatatagtattaatcactggaatgtccgttatacattgtgctagtcgtgtctttgcaatctcgcatagtggagatagaccagaggaaacggcttgctcctgttgttttagggaagtacattactgaaggaagtaaaacaactgacaaaaagatgcacgctaacccatcttatataggtgacgtggaaagagaacgtccgcgattttgagacgttggtgttgtgatatgaggctggtgcagatcaggaagcaagccgcgccatcggaattagctccgaaatgtctatacagacaaacaagttgattgtaaatcaacttggctccgtgttgtatatataacctcatcttgccctctagaataaaacacgatttatacctctgaaccacaacagttggtccaccgcccgcctactcagatatccccacaacattccatatctcacatcaataatcaaatttcattcgtctctgcttgcggctaccgactaactctagcttgatgtaaatgtttagtgaaggcgggtaagagcagattccagcctgttctggaacgtgttgagcctcaacagctgcatgaagaaagcataccatgtgacttgaacatgtttgactaactagacgccgccttcggtaattttctgccggacccactttttgtggttggcattccctccaaccaccgcatcgtcactccgccaggatcgtctattatccaccaaggtctccccggacagccgggtggtctgctcaggaacagcatatgcagcgggcatggcagtcggtgtccgaccgggctcaaactctctttcaatattggagggttctgttggcgctgcgatcgtgtcggatgtgccattgatgaaagggtcaccgtccggccaccacttgcaggagggttctagatcaaggtcaatcaatcgccaatcaccactcgctctggaatggacgatgcggtgtactgctgcgcgtgtccatttgcttgcgcacactaatacctgttagcctggcaaaaccgaagtgcataaacgggagagcgctcatacccgaaaccgcggtcgttccgcctctaccatccattagacgtgccatctccttgccgatattgatgacatgaaaatggtatttcaggcgcgtgcaattgcggttgcggtaacgagtccggtccactggctgggtatctaggatatgtatagtgaattgcagaatctgctaccgagttagcccgacctattgtaggagcgatagcgagaagaaagatttactcacatcaaaaccccggtcatctcggtgtctatgctcgggacaatcgtttcggtcaaacatacggtcgagctcgaggatttgcgagatttcatcccccacccaatgggggtggtctattccggtaagcacaggacaccgcaaagcatccgagcataatgggggactcactgaaatgtttcagcctaacttgccacaggacttctagccttcgcacagtgtttctccggcttcggctttcttgaacgagatgtcgtatgaacggcaacgcgcggaagagtccaatgtcttcaagtacaaagacgatggtcccgtactggccaaggttaggtggatgcccatacggacccagcacgcataccggaaaatggatcgtcgagtacgtcgcatgatccgcggcttgtgcaatccttccagtcactcctggtcggggtcgggtcactatgcgtaatgtgcgagtggtctgtggtcctggcgcattctgcactgtgtccactgaagctacgtagaatgagggaagctgcaagaaagacctcacccctgagcgtggcatccagagctggacatactgccccggttgagcctcccaccccatgggaactgcaatatcaagccataaaagctggttgaaagaccgcgcgagtgcccgtctagaggtgatgcgccacgacctgtggtaccacatagtatgcagacatgtcccggcactccaggcacatccggcgcaaataccaccaagtaaaacccagcggtaggacgatacccggtcgatcaaatggtagaaaagggcgccggtggcgatcgaagcaagcatatagtggaccttgaggccgagttgcggccaccggcgaaggattgcagccaacgtccaaggcaagatcgagacgagactacatccggcctgttcattgttagccacttctagtcagacatactgcgtaggaatgggaaggctgccgtcctcagacccgcttcacgtaccagaagtgggatggcgagacgagctccgtggcttttatttcgagcatttgctcctaagacggacccatgaagaaggcaatgcagcacgcaaatgcgacctagccaccgatgggcccagtagaacgtgtcgcgttcgacatagtagacgtgggccggaagactgaagctaaacccggagcagaggggaacaaggtgtgtgaccgccaagcatccggctcgcctctgcacatccacccaggtctgagcatgaaggctgattacaatggtatttgcaattaccaaggctgtaagtactcccccttgcaagtatgttggtatatccagccactggagcacgcctggtgttggggcctggaagaaacttctccaggatacctgctgcaacctcaaaggcaaatgacggaatctgcgtccgaggctacaacatatccagcatacaagagcaaggagcccacatagaccgaatgtatcttggatggaagctctggcaagccactcggcaaactttgaaacagggcgtgacatgctttttaggacaggcaatactggacatcagcgggtttatatcttgttttctaaatggctgtttgaacaacgttgacctagagctttgattcaggcaggcgaaaatggcttgggagagcgatgcggcaaaaatgacactggtgagtaacgatcagaaacctcattttatgacttgggatggtgtggcaggttgatggctgaaatttatctttatcggcagcgtaacagtggtaatccgtctcatgtcgattgcaagacgtgcgtctcagaaaaaccacgttcggcgttgagccttaattctacggttcccatgttcctgcattatattacaattgtgagttcacatagttcgaacagttgaagttgatcaacattctgagaagcatctccacatggtgcatggtcgcttatataatagacggcgaccgtctttattagaaatatcgttgaggcaacctcgtgatacgctcttcaaactggtcacagttaggttagaagcgttccaggtcgtacttgccttacgctttctcaggcttccaacgtcaacgatctgtctctcaaccgtactgtttcctatcagggctttctacagagtaggtccgtttgaggtatcgaggaaagatgccaggtggagcgccgaataggtctattctcaagttttggtctatctgtgagagttgtcaagttataatcgagcaaagagtcacatatttatccacaaggtaaccacaagcaacaatgtatgattgaagacgaagaacccaactaggtacacgaataggcgtccttatatatccctgaattcttcctgtgtagatgagtagatagtagagtaatagatttgccttggcagattctactgatcaaccatctaccgttctaccacctgcatggtaacgtggtcggttgtcccaaagtggcagctgatggtactgtgatttccggcacaggtagtcgcatatgtatagaaaagcctctgctggtgggtgtcttagtcttgctcactgggcgtgatcatggtttctctttccctgaacatctggagttgccagactatagaatgttgcacgtgatcttctgagacatcaattggttggatcttggtggcccatcggtgtgggtgtgagtcacatctgattttggtgacgggtatgccaggaacacctcggccagcgacggcgaggaatgcgggaaatagtatacatacaagatagacccgctgttgactatcgtgttttcctggtttctcttctgctcttgggtacaagaattcttcaagtaaaacaaaaccgcgacactgttagacaatgtgaaactgtctcgtgaccctcaacctgtttgcggcaaacatgcgtttgagctgcatttcgaatcagcgtccaaagtagtctcaagtcgtcaaaggtacacacaacctcgcaaatccatattctatgactccttcggggtaaagtattgtactggtatagtgatattttgcgattacgtccggatccctctcgctaaatctagacctttgtgccgggatcactgatcctgtaagcctcaagagaccttgtaaccacgtaactgaatctctttggccccttccattatggactttcctcaggcgtgaactaactccagatgaggggagttggctaaagacctatcatccctggcattcctctggccctcctgtttcgaccacaagaaaagattgttgtcacaagttcgagattctaaaattcaattcccaattttggcaacgacaatgaatggcaagggaaaagaaaacaatcaaatcaaaccataaataccaacagctacgttgtgagccaccaaagccttctaacacgcatgccgactctaggagtgagtgatgggcttatgagaagaggtgacctgaacatgagaaacttcgaggagctcagtaaggatagccgctttctctctactcgacgtttcgagtctgaacgtgagctttgccctaacaagccaagattttccgctcattcgctccagcagatagtaaactgagtggttggtggaactatcagattcgcccgtggttatcttgaagtttgccgggtccactacggaatatatccagataaatccgttggagtgctcgaaagaagcggcactcgcgttccatttcgatatcagcgtgttgaataatggcccgaagattgtgactggaaggccaacacagacatatcccatctcgtcgagtctctctggacgcagagccttgagtatcaattctgcctcctcgatcgactttgaatcaataacaaccgagtctgatacccagaattcggttgaccagctactgaagtaaggtgggaccttctccaatacacaatcctggaagtgaaagaggcttgcccggaggccctttgcttgtttcctttttttcgtattggcaaggataatcttcaggtttcctgactgcgctgtctccagaattccgatctgatagttatgatgttccaggttagtcagctgtgcttgagggaagacttgaacaacactattctcgattgatatgaattcttctcggctgtctgctttgtttggtgggcggccttgcggaagcatggtggaagggagtctgatgttgatactctgaccacagagctttgactgttcccatttctaaacgagctcctcggtctttgaatatatgaaaggggcttttgtgaccgggtttttcgaggagaggcctacacgagagatatgctccctgctgcgttcagcatagttatacatggctattggaactcataatacgcacctattcgcacgccgccaatgcgacagaaacggatgttggagtagctgtaacatcaagtgcagtatcaaacaatctctcttaggaagagcttctggtagcaatccgggagtagcaatccaggggtactgattctcgtcgatgtgaatatgcagaaccagcgctaatttggtcgacttttggcaatgagatcaggttataaaactgtttcgggaggccttatatgggataacacccctcaaggaacaagtacaaagcaatttacccatggccagtcaagatcaatcgtttttctatcacaactttgatatgttcactggaacccaacggagtttccatttttaaaccctggtgaaaataataaaccgcaaacgttcacaaactatttaatatacgttagtatcgtgctggtcaaaagcctttcactcaacgttgagtaaaggctactgaaaataggtctttcatatggcgagagtcaaaatcgccgaggtgaacaggctcgaagatctagatcactttacctgatggacatgcagagaatttcgccattgggaggcttagttcaataagatttccatgacaatgtccgttgaaaccttaccaacttcgttgaaaatttactctgcttattaggagggtctgattatggctgaagcagaaagttacaaagctggcctgcttcagtgagatgcttctacactcagtttgcggttggatctcctaggatttgtaacttccttgcggataaagtggttgtttgactgggcggaagatgtagatgttgggactagcctgcctttgctagtggtagatccagaaacatgtaagcaatgagaagagacctactcagaactaacttccgagagttgatatacaaagcctaccggttatacgtactgtctcccgcgtatggcgatagggccaaatttggttggggaaaacactaaaatcataaggctttcggctaaaaagcgatgacattgcttcacacgcgttaatacagagacagcttactagctggcaaattaatgatgtgcacagcttgagtactatgtacgaatcatgtcttctctgccataccactcactgtggcctttcctgctcccaggaccgctataggaccaaatattgtataacaggactatcattctggtggataactcgtttggcaattgttcttatcggtattttgtggccaacctagggatgtcagctcatccattagaaacagtattcccatgcaacttacagggttagaaaagtcatcattatgtctgtggtggcagtgctgactatagtttgaagacttagaggatcggttcgagtagggtgattgatctctatccgacaccacgaatgcgcggtcttcacttgtttccgaaatatcttctttctctgagtgctcagagattgactcttgttcttcggattcactgggctcactgtacgaggatataatttcggaaagctcattttcttcttctatggccatcttaggtaggaaatgccggtgccagatgaatttacaacagaagatagacaaattttggattttcaattcaggtacgacccccatttatgtagcccgagggtcgattctaatatgccttgaacatgcctaaagagccatgcaaagttctaacgacaagcgaaagaatttagctagtgcttatgggtcaaattactaaaacgttgattcacctgaatacctaattgagccagtgatacgtcgggaatcgttgacgtcatcgactttcaccgcttaagatattcccccttcgtgtagcacaggctttatctatgacctgatgatcctgaagctagtgaggatatcaaaaattcaatagaacaatatatagtgatgctgtgagacatttttcaacgtttgcctactttgagacttaagaaccgctggtggttcagttacgggctatctgcattcttgaagacctttaaactcactatctcaaatccccttcggtggttcctcaatctggtcactgggattcatcgacttcaatactcagggcaaaaggacggacggattagtcaggaaaccacggtatataatttttgacgcgatgactgattcgtgggacgcagcggtcgccctaccataaaaagctggcaccagtctcgcttgctttggctgtgatcccatttattctggcggcgtcccccgctagctttatacccctcggcgcgatgtgttcgattgagactgccttatcatcctcgtcagtcccaatgtcgctgtcttcggtatgttatcaccgggagccagttaactgattctaacttaatttaccacttgaagctttttaatcgcccctcaggtatcgtaacgctggaagaccgacccagaagccccctagcaaaactcatacggtttgtaccgggccgctgagattgggtgctctacgactccgactaggagaaagaatttttatcgtggtggctggagaccgagtatggacaacagctgaccaaaaacggaaaatacaaattcagatggtcggctgagtctcgttccttaaaggtgtggaagcactttgactaggtggtagagcttagctctggccgacctaaggtagtttgtcggtcttgcctcacgccgcttaaccacccacatcatccatgtcataaatcctatggaacaagcacaatgggtaagcacttgaagtccaacttatgtcgcagaagcaaagaggaagtgtccgtttctgctgttaccctaggcccaattcaggagtctcgtgtaagcttctcgcccatgaggagcagatttactaaggcacagttcgaaggacaccttctgcggacaatcacgtccgcaaacctttcttttgaggtcacggaagaacccatattccgagaattgttggatctagtctattccggacctcaagctttggaggttccctcgttaaagaagctccgctattatatgcacgacatagtaactacctaccaagagttacagctgcaggacctgcccggagattccaaggtatcgattgctttgtgctgttggaaaggtccgtttgggcaggactttatggcgattactgcctattattttgataaagagtggagctaccgagaggtgctgcttgggttcgagctaatttgcaggtctgagacagggaatgacccctgtgatcaaatacttggactgatccaggaaaaagggttgctccatcggatattcagcgtgacagtcgactatagggtcgatgagaacctgatgctgttattaagagagaagctcacttcttctggtggtatcagctcttggcagtgctttgttggggttcctggtatagtacagaccatttagctctgccttcggcggtatatcgagaatatcacaagctccccagaaggggaaagggttgagaatgtgcgagaaatatcacacgccaatggttggaccgacctatcagatggcgacgaaatatcatatgttttgggaaaggtgaatgccctctatcctcttgactaaaaaacaaaatctgacccttgcctttcgcagattcgattatttgcaaaatttgtcaacgagacccctaggaagcgcgatgagtttttgtgtctctagcctgcatcgactcgagtcttgccgttagacgatgcgaggtcccgatggaattcggtattcctgatgttaaaacgagccggtagactgcgaagatatatcgactaatactgccaggagagtgggaatttacaatataaattaacaaatacggattggcgtaaggtcgactaccttgtgcaactgataatgccattcatccagtttactacggccctcctggcgtcgagagaggcgacagtctacagggtctgtttcgtgtttaagatactaatggagcatctcgacgagtcaacccgaatattgagaagaaaatcagcaccgtggaagcgcaaactatctgaggcgtcgcttatcatgaagatggaacttggagaagtatacgaaaagacatttcaaaactttggggttatgtatggccctggaactttcgttgctccccaatataaggtgtccgcattcgatgaggccacattatcgcaaggtttgggccaacccgagcgctacatcgagtatctgaggatctttcacctacaataccgaccgcaaatgcccacgagcttgtcttgcgtgaacggactgtcttgttccccgcaattgttggggcttgaccggcttctgtacccactagctggtctggcgggtagctcaaggtgtgcgcaagatgaagttgattaatatctccgcgaaggtctgaacaactgcccaatatttcctgttgactactgacacgtaataggggttctcaatatctcgctatgcgcttactggaaagaccatcaacgcgaatggcctgttctcactcgactggcgcgcgatctactctccattccggctataggagctggcacagaacggcttctcaccgttgcacaaaatatctgccgtacttgtggaggatctctggacgagtcgaccatgcgagatttggtgatgtacgcgtactcggagggatccgaatcagggaagcaatcgatcagccgggtgtaacgtgacatggcgagtgacgatgaatgggaggagttcgaagtagaggcagaaaggcctgaaccgatcagcgatgacgagtgggattcagccgagatgagtgttgacgagcgctctggggacgacgaaaacagctaggcagaggcagtgatactggagatcccacctacaggagacctggagtaggatgtaacggataaaggcgaggggggctcattcctgcctccgcctgtcacgcagctcatcaatagccttcgaagaagattctccggcagatgacagtgatctagcagggtgtgtcatcattcttatccagcatttgtttgctagaatccggcctagccctacctatccgcagtataaattcattgtcgttgatttgcaataaatcgttccaacgaagaatgcatcatattaatagattctgtggaaagcgcgtatataggacagtcaatgttacaattctcacctttggaactgccagtcttgttgcagcggtcataaaaatgtggttgcgacgagcggacgccctgcagcttgtaggtagtcagtgattacttgtaactctttctgtgttcacaactatctttatttgcttttaccatcatgtctgctagatatagagttggcagaattcgatcatcagattgaccctcacaggaaccctagcccaggaggcacttgattctaggtccttggcagtaacgagggctgggccccagccggcacatcaatcaaacttccaaaccaaataattgaggcgcaatatccattttgcccttcgtcgccatcctgccactggttattcgagggatcttgtcgttcctgcttcttctatgtggtttacaggcgtagcagaattccagtcattcaaaaggcagctgagatgaagaaacattggaattgacccgcgatatgtggcgggtgattaatgcagagggctctttccaagataaagtaccaggggatccaacatgatcagtttgattcggttgtgacaggaatcaaggtatggcgagcgtactggtaagatctacaatggtaaaattatctgactaaaaacaaaaatggtctgaatttaacaatctggtcagacataataattaaggaaaacacattgtagaaatgtcgcatgattcagtggcaaagacggtaattccaaaataacatctggtttcttgacacatagatttagtcaaaatttcgccaaaaaaaagaaaaaagaaaagcaaaagcaaaagaatcaagtctataacatctttaacgcggggattgatttccagctccttcactttcgcctcaaagttcttcctcaacctccacatcacccttgttcagcctctcctccttgtagtgatcgtaatttgccaaggctattctgtatctcttttctctctcggcttcgctcatggcgttccacttctccatcttttccacacttgccatgtaatcttgaacattaaattttttaggcgcctggttcttgcttagactgctcccactgctttcgacttcgacaacattcgatccaggagcgtcctaagtggcggaacgggacgggacaacagtacttgtctcctgctcttgctcttgtttgataccattagccatattgtctcctaagatgctagatcggctctttagggtcgatgaaaaagaccctaattgagccggtgtgcgagatctttctggcttgattttctccgcctcgaaggtatctaaagggaatggcaaatgtgaaaccagtttaccctccttttgtatcgccttaatgtacagagtctcctgcaagtcctagattgcgcggattccagtgctggccaccttcctgcccgacaaccgaatcacatccgtccgaggggtctagctgcattcgtcgactaataagtaccggtgcttttccttgatatccttccattcgacattgatccatatctgtggacacttaaggttgctctccgttttatcaatggcgatgcctctaaacccggcaatatttcttttcgtatattgccaatgtcgatccccgtttggcgcgttgtatctgagcagggaaatccgattgtgggacagattttcgaaaccttcggtactatacgcccttgttcttcgaaacacgtgcctgggggcctgggcgggaccaacccgaaaaatgaagaaccgacttttccctgtgccgccaaacccggctatgtcgcctggttggggatcttcgtggcgtcctttcttttcacgacggcattcatttatgttcaacttctcgaagtccacaaatagttgcgggccgacgcttgaatcattcattccacgtgtttgtgctcccgccgtgccatcagaggtcgactcgtcggtgagtttaggttcagcatccgacatttcctcgtccctcaccggggtctcatctgcaggccctgtttcatcgtgtgggtctccagaaatatcagaacgttgacttgagtttggttgatctggctgccccctgtcggcgggtggtcggtcatccacgggccccggtgcagcagcaccatgtttcccatcacttggaccctcttcattggagttttcctctttttttgcttctccaaggagattttccagcgtttcctggcgatgtctgggcgtcttgcgatcattattgggcgttttcttcacgccggcattggagaccataatgtggatcttctatgaggtcttttgtgaaaatttagcaagatgcaaattattcatgtttttacagaaatacatcgagatatttataagccgaaatcacagcggagtccaactatgttcccccgctgaaggaggtattctgcggcttgctccaagtgcctcaatatttttgggcttttttaggacttttttatgacatcacgagcctccttattctttggcgttgacacttgttttcaaaatggtagaattttgagtccagaagttgtgttccaggtttccgtagccaccgaaacctgaggcggcgttgacaacacaagaggcgaaagaaatcaaacctgcctacagtagttgaaggccagaggattgtttaattatcgcttcgccgtagatattgtgtactcttcaaagccggcacaaatatggacctaaacctggggctgaaagtcgaaatttgactgtttgctggtgctgctggatgatcatggatgccccagaatattttgacgttgacgtctctacatctgcaataattgagacatcaccataattcagcctgcggctggagcagtatttccaaattaatgctcatgctcgtgtggctcaatagagaagattggtaaagactgacgatctgctctgtgtaaatatccaccaaccttggttttacaacgacaacaaaagctgtccctggaaacaggcgagccacccaggaatcacatagggacaccgggaaccatacgtagcttgtaaggctactcattttcgctttcggggattcagtcatgtttctgggaacggctctgtgagtttggacgttcagaacttcattcgtatcaattctaagcttactccaagctctaaatcacggctatgctctctcttgctgatccctatgccgagtgcctggtcacgcgtatccacgcgtgattgacagtcccttcgctaatttctcactctcgtcacaccgcggtatactaagatcatagataacacagcacaaaaagttacatctctacgagcgaagcgggttgaaaaacccaaagagcggctggttttgatattcgaggcaattcgacttacgaagaatgctattgttccatcgttccaattccaattttcctggtacatacctgcactttctgacttccttgatcgctattgcagtgattggggattaaaggtgcagctggcttatatgtatatttatttttgcttgccgggtggtctcctcacccttcaggaaatcgttcaacacttctccgcacccgaaggttctttttcatggactgatagaattggagcttagcacgtttttaaatattgatccttggttacaaaactatacatactcgttcatttccaatgtgccagttattctataaaaagatagccaataaggtaataagaacgagtagcctctcactcgtacagctcctcctcatccgcaacagcacgcttgggcacttctcttctggctgtttcggtgagaaagtactctccggacgcggtgtccgattctatttcttcccacgcaatggtatcttcgtacctgctctgtagcaattgcgtggcgagctgcatcgtgacccaatccctggatggatggtgtcggagatcaaggtgcggtcggatagcgtttgtagatattgtattatatcgataatcaatttcctactaattgttgtgagggttgggggtctctttcgatacatgtttcagtcacattcttggggatgactctatctagggactcacatcctggccctaggagctatcttgttcctgggggcattggtgcgattcctgagagcacagatgcagcttctaggggtcggataggccccaggaaacccgacgtggcttctggggtcttgtacttccggctcagggaaccaaagtggtgttcctgttgactgcctcattaactcctggagcgtcaattgcggttcctagggctttatctcaaccttcggtaagagctctggtccgtgtatttcccagcggatacatagctcctacaagcgcttcgacgtttccagtgtcaatgcacctattgtcatagtcaaattcccaaggaagaaaatttgtcgaggcacccgaccacaagttttgatttttctgccaacaatcttggtcttcactcaacattggtccattgagctaaaaccgatgtctatattcttttggcctccttcattaggtatgacgaaaaggagaactcttatatactacactatttagagctatgaacctaaaatcaatcgaaattgcaaagcttttggggtgcactgacatctagtactttgaaagaggggcagtcgcgtggtgttctgatggtataaatatcagtatttcacatttggccgctaagcttgctctaaaacttcatatgaacggctacgctctctgttgctggtccgaatgcggagtgtctggtcacgtgtattcacggtgattgacagtcgcttcgctaatttcccatttcttcacgcgttgtctgtaaattgtaatcccccacgctgagtggaagtcagccgtgccgaccagcgaagcggtgcagaggtagaagggtctggcggtagatgagcccctgataatctggctgacgacggggcccaccagtgggagatggttcgcccccgccgtgtggacggaatgtgagtggctagcaagcgatagcgatatccttctacagctctgcaatgtgcaagcttcagtattgtgggagcgcaagcgagctcttgtaacggtgttgtgtcggccttgggagggagcgatcttcaagccgccgaggagcctgagggttggtaaagtctccatgtggtagagcgtttatgggcagaaagaatgattggattttccgctatatattcgtgtcatctcctaaggattagcgttaatattagataaggtccatactgctggtgaactttcgtcgggttggtgacggggacgaacggtgcacggctgttgattcattcaacccattcgacaacttagcatatggctgtaaattcccctagtttgtcctgattctttgtaataagggagaatagaataacttctcggcctccacctttccatccctcccagcccacgttaaatctttatacacttgggtatttcgtcttataacagaaatgaacgaactgaacaacaatggtctgtacccattgccttgataatatcttgcgctaacattactcgtctacgatttgcttcacgctatctggaatgaatcttttggcataccgacacctcctccttgtctcgctactgaccccaatgatctgtggcaggattttcttggcaaagacgatcctgcagaatacgaaactcaagggtcttcctttatcgaatgccttttctaccctgatctcgacagtctgtccgggttcaagtggacaggtccagatcctctgaccaactctactcgggctagcgacattttcctccacatgtcagcgctccttttccctaaagaggtgcactggatcgaatttcgatttgttcccatttgaccgagtatctgatgagactataggagaggatctgttctccctgccgcgggttgaaacggccatggcgaatctctatcggatacgcagacagctactagacacaatcacctggcatgctgtccgtgcaacaggcactagcttccgactgtccctttggcctcgtacggaatctctaccgtactcgagtctctcgacacattctctgttaactaggcttcccccgacgctatccctggacccacggtttttcgtacataatatatcgagtaattacgtgtgagattgatctgaatcaagcggggttgttcgtatactcatttcagtaaagaccacaataatgaataatgactatttgatgcccttcttgataaaaagcctcggaaatatataacctactttacatacagtgtgattccccttgcaatgcgtcgccgcttgtagtatttctacgtcgccaatataggacggggcagcccggaataggcaattcattactcttctcttataacgtctaacaaccctaccaaattgggactgtaggggtagttccagttatcgagtaggctgatcagtcgttcccgagatgattccaatgcctgtccgaaaaagcgcagtcgagctagctgcttatcgtggcgaagctgaagtccgtccctctcttttctcaggtatgtaccagcctccttcaagttctgattgctctgctctagcttctggccattaatatgcttagacacacacgactcccataggcgtcgatagggtccaataagtcgagctactagaaaggcaaatttgggatcgtcgcattcgaggtctgctagtaccttcaaggtgggttgaaacggctcggtcgccaaggtatgtcttgtttcttcttcgtgttgcgaaggggaagtctacgatggtcagccaaagcatctgaagccaaatggtgtcacttaccaatagagggacgtgatcagaaggttccacatcactgtccttattactaaggtttggtaattcacagggccgctattctcctttttcctggtctagcgagctgttcgaggcatcaatttttcccaggagaaagtcaaggtctgggcgatactagttccatcaggccttggtataatcttatagactatgagacgcagacagacggctatagactgagttttacgatccccacatcagtcaatcaacgcagtcagcttagaatttgcttttattttcagcgggcgcttggtagtaaatttgagaggaggagtatcaacgggttggccgggaaaactgatcaagcctgacgatgttaagggccagatatggacgcccattgacgtgagagatatctcaactagacgcctcttccactttcgttggaagcctgggaaacccggcaaacagcattgcagaataggtagttcggatagtaacgaagggaaaaatagaaaagaaaaaaaaaaaaaaaaaacaatttatcttcgaagtttgatggttatcactcaaattgagcgttgataacgtttggctaagcttcaacgggttgacgggtcatgctaccgtgacctcgctttctgcagtctaggcggacagacccacagctcaccacagaccaacataacactaaaacgaggctagaaacaaaggtacatgattcctagggatagaattgtaggagttttcggtgatccaacgttgagtcgctaatatatgaggtgactaggataagaaatatgtgaatacgtgcctgttattgcggattgaatatctcctacaaagcctcctttaagagggatgtgaaggatttaacagttagctaacgttacttgaccgactcagcgtccctttctctcagtactactcttactcgcctctctcgctaggcatctaaaggtattaagaatgtcgctgcaaatagttgcggtaaaagaagacgtaggtttcaacaggcctcaattaagaaatgtgtccttcaacacttctaaccaggtcggtaagtgacagaagccgaaaagcctataaatacgtcctctacccctacaatcgctctactatttattcacttgattctgtaaagtcgagcaggcttgtgtctgatgtactcgataagttctccctttgatcgagtactagaatttatactgtgctaacatttatagtatatattgtggaccagtaaaccagatagttcctatactgtaagagacgtggttctaagcattcactgccccatttacgctagccgataggagatatgggatttggattagctggtcaaggtatctatgcgaagaggtctctgctatagcgagctgatctactgtcgcggctctggttgaccatagatttgaagtgtaactgctcacactgtaggtatataggcttacaaatctttgaaactgtactgacctgaaagacgcgggacagccagatctatggacgttcgaacacaatgcactagagtaagggccactctttatccctggtcttaactatcagaaaatgtgagttatggaattccacgctggtttactggctaataattgacagtgaacctttaggagcttaccagagtggccctgataaccctgtactaccgtcagtgcaaagccatggcttacacactattcctagccccgtcgcttcgaataatgcagtatgtcctaggtggaagatcgtaaactaagatagcgagttaacaatagggtgcggaaatttaagtgcaagctttagtcgtatcgaagcttgaggcgtccgtccttcctgatagtgagttatcgcgtcttctgctgcgccggtccggttgaatatgctaagccttatgcctaaaatcacgataccactgataccttcacgctattataggagcactctatcattgagggtgaaatatactgtggcgagtggcctaattccgctagatcgaggataagaccaaggtggcggccgacaagcgtgctctatcgcgtcttccgccctcgtccctaccgccttcgcactgttgtggagttcctgaacctctggcatcgcgacacattcatctactatggaagtgcaatgtttatcgcgggtgggttcgtaacgcgtttactgtcttaacaaattgtcttgtgtaccctagcgcggcttttttgaagcgagtgcagattgcgataagcttgaatgcgacgtggcatggctggtgactacattgcagagagttgtaagtgatctagttgtgaagccgatatgaccattgtgcaaactgatcgttacgtctcaagcgtactttgggatttctatgaacaggtacgctacggcaactcgtctaactagattagcccttactgactcggatcgtacaacaggagaacaccctcatttctgtcacttaagtcgaataccacgcgaacaaatgtcttatctactcgagctcccctatataaatactgtcgcatgctctccatcccttctatatgactactatcgacaatgagtcacagaaggttcatatcgcgtacctcggcctctttctccctattgattctgtatatcgggtcattgttcgatttgtctacatgatataactcctaaactccgatcagcctatactactacccaaatcatacctatggctaagtatacaacctttcaaatacctttaagtggcgtaggctgctggtatcgaatgcgtgatcctcgttatcttcggatggcatttggtatctttccagaactagaaaaacgcacaggaatgttgatgttttatcttacttcctggcagataggcgtacctctgtagacaatcaggctgttagcacaagtccacctacaaggggaaggagaggcaaagtctccttattcttagcctataatttgacattggttatctcaggtataaacccagagggtaagatcggggcacacgcaagccaatgagagctcactacctaagaatcacctcgggcatacaggaagctgtatcataagggctgtcaaaagtattgtggtatacccggttggttcttatacacacatttcctatctaaaccgaagcactatctacaaagaccatttacccctaggtatcactgcagctgtaggttagtcaagtcgaccgcgcgtatcctttatccgttcatatcgtctcctaacatatcacgcacttgttaggaaatccggattccctacatccctatttcgatggtttttttgagaataaatcatatattcgtcgagcccgccgcgctgcggaggatacgtaggcatgttactgttcggctaggcggccactgtaaagactttggtgtccgaaacaatatcgaatcagaatgtttataggacctcttagactagcccctagatcctggagcaaactttccgccgtcaatcaacgcttatatagtggttgcttttggaagtatggccggattatctactacgactacgagcgaactagcactcctgcggggatatcacctaacggaaattcgtttcagacggcactgcttgaacccaatcgggtttcaattaggtttcaaccgtgtttcaaccgtgttcccttatcagcagaatatggttgattacattaacttaggacaccgcttcctaaaaggcaattgccgtcacttcgatccgggattggttaaaatatgatccgtcgttgccgaggtatagtaggagccaaccgggtattcttgattgcttacttatccaaatctctcagcaacatggttgtctctgcggtaaaattactttgattcttacgctctctaggatataagagctgaaatagggtaaggtcgagtgactcaattgccgcctcaagtgatggctttgacttcgcaaggcacaaagcctaccgtatggctaattttactcaagccattcgttcggcacctcatcacatgcttctacacgtgggtcttgggcgtattgcttgatcatagttgaaccagtggatctactgtcctatcggactgaggctgtatgcccactttaccgagtgatcagaatgggactagaaatggcttgcgaaatagaatcgacagtgattgatacatttatcatgtgggtgagatggcaagaaaatctccgtattacgtccgtgtgacattgatagacctcgctactgcctataaggcccatagatttgcactgagttactaccccctgcctataggcgggcgggcggttgaccgaagccccgtgtcatataatatgtccataggttgcttactaataagcactttggtcactgaaatttcataattttacaatgtttagccacatatgtatatatcctatagtactacgtattcaggttatttaagtagaaaaggatacaatggatgtgtccagctataaccaaccctagtaaaatcaatggaatatcgagtctaagtgaaattgaaagtatggtccgaaatgtatagaaattgtgatacgtctgcattgtgtataaatatatacatgaccacaaaacatgctgaacctacaaaaccacttacaatataatgcctaccagtcgcacaatataatgcctaccagcgcatcagtaaatttattattaacacgacatactagttatactacatactaggattcgcctttattatgatcaattatctgctatactagtggttattgtcacatgcttctacatgtgggtcttaggcgtattgcttggttatagttgaaccagtagatctactatcactatcggattgaggctgtatgtcaacttcaccgagtgatcagagtgggactagaattttcgcttacgagatagaatctatagtgattgatacatttatccatatgggtgagatggcatgaaaatctccgtactacatcggtgagacattgatagacctcgccatgggccatgaggcccatggattataggcgggcgggcggttgaccgtagccccgtgtcatttaatgggcctatgtgttgcttactaataagcacttcagtcacatgaaattttataattttataatgtttagccacgcacgtatatgtcctatagtagtccgtattcaggttatttgagtagaaaagtatacaatggagatgctcagctataacaaatcctagtaaaagcaatggactattgagtctaagtgaatgaaagtgtgatccgaaatgcatagaaattgtgatgcgtctgcattgcgcgtaaatatatacatgactacaaaacatgctgaacctacaaaaccactcacaatataatgcctaccagcgcatcagtaaatttattataaacacgacatactagttatactacatactaggattcgcctttattatgatcaattatctgctatactagtggttattgggggtaggtgacaagtgatagatttccaaaagttgaaccccctattcaggaaacttacataatctgagggtggcatggaccgatggcaaggcctagacgttgaccacctttttcaccgcccgaccattcaccaccacgctcatcactacgttcatcaccacaaacacacacatcaactcacacatcaacacaaatcaccactcacatcaccacacacatccatacgggaggcaccctgtcggcagtatgggctattggaaataatgccatttgcaaagttcatcattggagccccgataccacctcagaaagcgaaaccatcaaattcgttcaaaaaatggcaccccaggtacagtacgtcccgaaactggtgcaaccgcctacatttcgattgttccacaaatcctagttgccaagacacgctagtctatatcaagagtttttccggagtatccttgtcagcggggtacgtattatttggtgcgaatagtaacacggttcaacgcaacaagcattgcaagacgacactcatctctgtttgcctacatctgaatgaaagatgccaatttctattgtagcgaggaagctattggatcacaagctacttcagagtcaagtctcgacctgctttcaaaaacttgcgttcagtatggtgaaccactttttcgactgttgaaaagacagtgatactgcaaggatatgattctcacatatcattgaatttgcaattaaaccgctcaacgctatggcagactgactactctagccgttttgaccatggccactagccacggtcaccgtctctttcataaggattgaagtgcttcaacagatgccgcaataatgggttggaggctttgtgtacccgtggttggccataagacgtgcctcccattgatccctctacaatcccttttgcctagcctcgcgctaacggtactttctgcgttgctcgcaaccaactgatgttgcctccgctaatacttctgctacctgtcggtacagatactatgaatatactcccaaatccagggtattggttgttttccttgacggagaataaaaagtctagaccttattggaaagcccagaatagaaacccgactccagtttccaggacaatgaagtgagttatttcagctcccatggctcacgagctaggttttcgtgatcgccaccccctcgcaagattgcaacgctactatcacagtcatgagaccctggagaagaatagcacccgacgggccaatcaaacaccacgcgcgaatctagacagacgcaggtagggttccgcgatgcagatctcagcaacgacccacggaacagtagatcaatgaggttctatttgtggagagaaaatggaaacaattgcaaaggtctaggcacgatccacaagctcaaacttttcggccatcagtgtacgatggaacgggggattgttgcctaggtactgctggggcaggtgagtatttggaataacacgcaggctttggcgacagaatggtaggctacaatccgatccgtggttgtgttcacttggtcgtagtcattagaaagtaagtacccctgtcaagtgggaagcagaactttacctctctggtcagtagaacgttctagaagctatatatcttctcctgcaccaagctttccggtgatgattatactatactctcttcgagccagacaagtcctctccatacgctcaattctatcgccagtctagtaactctagtagatggcttatagaaataatgccagtggatcacatgagcttacgtaaatatctccagtttttgaactaaacccggaaaaccgattggttcccgggagtgggttctgtggaccggcccacctacagcacctaacctgtattccaagcaccctgcctatctcgagaatgacactgaatgcagtatcttctaataaaatattgtcctttcctaatatcctatatatgagcagaatgagaatttgttgatcctactccggatctcgtttttttgggctagcaatctataaagtaagtgtagcagaggctgtttagataagctttctatgaggatcattcgtgacagccgcatcctcccgcatcctctcaccgagggagtatttctatggcttatcgaactttattttccggggttcggcgatcgatcgacgatcccggctatgttctacgatctctggggaactaacttttgtcaaactataacctctgtactcccttactattatcgtaattctaaggaatggtgcttgtttatattttaataatatgtatatttatacatataacaatcatacagtagcttgattgctcagctgccatgtttgccattttccccgtttgtagcacatcaaacaacactaattcgttaaggtagttgctattgctacttcaagatcgcgatatagcgcagatactaacaaactgctggtagtatagatattccgctcatcagtatctcagcttcctagctgcacagacacgatgtatatagttccaaatctacgatgacgatcgtgattcttcacactataaagggcggagtaatggtatcgcgcggcctatgatatatgattagcttgtggttaaagggtggtaaacattagtttatacctggtctcgaacctttcctcttcattgattcaatgctgtcgatctagctagtcttagtggttaggattgtttaaatccatttttcaatattactttgcgtaggccttctgcttatgagattcgctaatgaagccttatagccggccgagcgataagctcctgctcggcttcgatggcttagatggcctggatgcttaagcggtctggtactaatacaacgttgcttgcgcagaatatagtacttttttccttgcagagactcagcgcttcagtctatctgatattgttcagaatatgcgtgggagcgggctttccacggcagcgcccgatgagcgtccagctaggcgagaaggttcttttcctcctattcctcccaggctacctcgcttcgaggggacatatcgcatgaactagtagtaaccagaatagaccttttcggacaatagcacgacttgagctcctgatagaagggaaaagtgaacctaaatcctctccacgtcctagtaaaaagataagtacccttggcccactgcaaatcttctaaaggttcaataacattacacatagaccattctgggggtcagttcggtgagtctgaattgtgaattattgattccgtattccaggctccctcaaaccgtcggtgttgaaataatccctagctataagaacacctaactgtcaatttcatactccttgaaattgttcttgaatgtaattactttacattaaaatgaacaaagcactgaattcccagactaagccctaccgggtactgaataatgtaaccctaaacagactttagaggcaaaacttggcttcgtacaaagttcgttcccctaaagtttaatgaattttatgactgattggttgaaatgtattccaaattaagcgataattgtggtaattacggatataagatagtgggccttgcaaaccctgatcgcaacctctggtttagagaacgacctcttcatattagcctgtgcgacttctcttgtaacatctggctgggagaattcattatctcaccttaacacagatctaactatagggagaatccggaaaatcccgttcactgatcaacgataaagctttcggagccaattataacatgcactgtccctatcatcctctgggtccgaggatatctagagtccgccaggatcagcggaaggcgataccacagaggaagagtcttctttacaggagaatggctcctttagtaaccaccaaaacgacattacagtggaggatggccaggaaagtcctctacactcctagagtataggcccgagaccagaagaaggattggaacaacccggataggctaatctcgcggaggactgtaatatgatcgccttacaatgtaccgcagagtgagtacgaatttgccccctataataatgttttgtgatacgtctgcttacaacattcagcctagatatccaaacgaagttagttatacgactcaccagagaacgaacgaaggctgactttcctaggctcatacaaaaagcattggataactctaacagctggattgcaactattcgcagtgacttagaggacatccgcagtcggttggcggtcgtagagacagctatagagatgatggccaaagaggggaagaatagtactacagaggataatgcaactaggcgaatacttcggtcgcagtagtaatctggatcgaaatatgatatggttgtagaatatatcccagagcctattgtcagccttattagctgaggtatcaccatcgcattgtacttcgcgaccaaccatatctcactggggcagactggaagctgtaaataaccgtaaggctacagaaagtagacaaatatttactataattgcgctgtaacgaactgagctccttggaacgaattctctgactccgccagtaacagttgtaaaccgattcgtgctattaaggtttctcgagcgcccgggtatcatttttatcggctaccctctccctggcccactagaccctcacgtccacattcagtggtagatcaatttgagatataaattggctgtcgtacgcttggtagagtattccaaatcttatattatgacccacggttagcccgctcaattgggtttcggccactttaggcggaccagaaaaatactgtagtttgtgccagcgtcgtaggctgtcgcttaaaatcctattatctgccaagtggcaagaaaagtatatgtgaaccaagcgccaaggaaacagccaaatttctttatgaatatcgccgagtcatattgcctatcaaatgctagggggagaccacggatatgattagttagattcggttgcttccgacagatcagcgtatcatctctccgggctgtgggccctaccgctaaccacatttagcgattatggaacattctctctgccctccaagctgcgcttggtagagcgagttaaatcgtcagaggatctacgtcaatatccttctatggcagaacaccgatcgatataatctttgttttctatatttactgttatcatgggacggtagtggcgttactgaagattatcttatgaactatccacctgctagtgcttgtataaactgactagctggttcctctatagtaaagctaggaccgctggacacgctaaatttgctatgctttatacaggtgattagtattggttgcttgaaactggcgcctcctgatttataagggtataattacccagagcggaaaactgaggcagggtattatgacctagagtcccaagcgggccgtcctgctcgggctaacttccgttaatgcctcccgagctaggtaagtaggatgccagtctatggttctggagggtatcgatcgtgttctagaaccgagtagtcgccgatactagctcgccatacgtttgatgtaagaccggctgaatatcgtgccatgagactaggccctgtatggtggcgtgagatgactcctacgcctgctgcagttgacagagctctcttttaagcctctggttctctcctaaggctttgtctcttgctgtgatagcctcctgtagtttcgaggtatcctgggctttttcagtatgcaaacgctgtatcgactgggaatcatgggctctttcttcgtctatctccttaagagccagctggacctccttttggatctggtccatcatatctaggcactttcggtgggtcgcttcatggtctttctttcgggtgcttttcgctgtagaatgcccctaaaagctagcgttagcaaggtgtagttataaacgactgataggataaagtaaaagaatataacgaagctggagtaagtgaaggaaaaatagagattaacataccagccctttgtgattccctaccgccttgagagggttacgttccgccttagacctagaggctgtggaccgagcagaataaggcgaaggggcatatgccctgccagtcccgggtttcgttgtggcagtaccgcggtctgcatctccccgagagggcttttggtcctttgccatgctgaatccttccgtctggtgaatgattgcaggtttagaaagacactgggcaaagcgaagaaatgattgatcgcagtggccttcggggagtctcgactttaaaagtttaggtggagacaatcaaaagccctgaaacaaggtgaacgcgtgacctcccccctgccaagcagctgtgtcggcatcagcatcatgagcctgaaagccaagtacccattgacacacaggggccccacggtgcgctagcgcaaaagcacaagatctgcgattttattgtgaagaaagtgatcgaccgccgcgcaccgggatctacgttgaggtatacggttgtgcctcagtattgaccagagccgaaccatccgagccgctcttggaaacaagaagggctctctggcctcagccatgtgtggtgtagttgtaccattgtcctagatgtaacttccactatatacactgtcccgctattgcaacaatttcggaaagttgggccctaaagacttccatttcattcggagaagaaaccaatccagaaatattagggcatgtattatgaaactagaatttggaatccaagttggaccaaccattgccactgtcgtgctaaattttccttcgtcaaagctcaccagggttccatagctgaccatgagacttctagatcgtgtggaaaaagccatagcaggaacctgggcttagtttccggggcaaccatttgaggcatttcaactaccaaggctcttgagctggggtactcgacgatcgccattttaccccgcgagattgcaacgctactatcacactctggtaagaccctgaacaaaggaagcacttgtaggaccaatcaaaaaccgcttgtgaatatggaccgatgatggtacggtcctgtgataaaaaaaactcggcgatgacccacgggacaatagatcaaggaggttctatttgtaatcaagagaagaaatagcaaattttttcaaaaaggtccagacacgattcacgaacccagtctcgacagaccagtaatgatgcaacatacctttgttgcttggtcctgctgaagggaccagcctcacaggtacggcagttgaggtatttggaatatcacgcaggtgtccagcaaaagaatggtacgctgaaagcaatccatggtcgggttctcctacctcctctcacaagaaaataacttggtcctccgtcgagtggcgacctgttggttctcgttagtctcgtcctttgaaggatgttcaagaaggtatgtaacttcttctgtactagcttccccaaagagtatacccacttcgaatgcgaaatctgcgctttctatgtgctcagattcgatcgccagtcttataaccctagcagacagtttataaacattcaacggatggatcagctgggattatataagcatatttttttgggttttgcctgaaaagccgagaaaccgattggctcacggaaatggcaaggtcccactccttttccagcatccggctcattctacccgtcctcagactctggagatcgagaatattttgaatacagtagtgctatttcataatattccaaaagactacgcccgtagtgagtatacctgattcttctgcattctcctataactattggtacaacctcaaccatgactgatctagaaagcaggtggagcagaactttattggtaaggtttctaatgagatcgataaatcctaagtatccatggataatttcatcctctcccgaggcagtgtttccatggttcctcgaaaatcatttgttaagattcaagataaggcgattagtcatgggccgacgatcccgccctcggttttgcagccatcatgaaactagccctatgacttgagaatggtaggaaagctttccttcacgtcaaaaataactgtggcatagattgaaaatcaattgtatgcctcagtcccaactacaaattactctggtttcgacatagctaacttacccgttagacccattcagaccactgggaatccagctaagcataattctcctaagacgataagagtccagacgtttttagagcttccaaggagccccctagctacgatgttatgatctcattgcgggggcagttttcggttcgagaggcttttataaaccaagctgttaatcgtttatcctctatacttctagccctctttgtacccgttaagccttattagaccatagatacactcatgaccagcctaccactaaatgttggggccattctcatagagaacatctccatcatctagatcgtatctatgttctctaccggcgcatacaatgccctagaaacagcgattatcacgttcgacttattcaagcgctaccggggcctctatttctagagtatgcaatttgcatcctagggaattctcgtatacgccattcctactatagctcgctttatttcttaggcgtccaacctcccgatatccatcccctttataataggatggtacactatggttaccggccaagctgtcgtcctctactcgcgtctgcacctcgttttctccgacatgagaaaggtgcggtgggttctatagatgatcattacaaacgcttgtatcctatatatactaataaccgtttttttcttcggccttaaccgcggcgatatacgctttgctcgttctaccgcgatatttgaccggatctaatcgacggttttttgcatataagacttcgttatctgtagtatatatatatatataaagcggtatatcatttcaagagtgctattataatccgcggtcgcgacagccgcaacgctattatctatctattttatattaacatcctcattataatcctaaacgtcttactattcctcgcggagtataagctacactacattcaagtaagctttaagacggtagtgtacagcgtcaagctgaagttggaattctctgtgctcaactgtctccggttgctgacaagtacgaacccctatatctgctagcatagacctaaggacagccgtcgattaaacgataagaatatttttagtatggcctctttataaccagttatcgcaccagatataagctcgcaatctagagcaacctaaaccgatataccacgttcgttacaactaagcagtatctatggatacaatgaaacgctacgcgagatatcgagcgagaatatgatactccctagagacgtttattcttcggcaacactatcagagggccacttaaatacccttccgggtagctcctcagaaaccctacctacactagaattgagcctatcgcaattcttgccaaagttcgacatctaagtattccacgagggagtactgctcgtttatttcggcttattaacagcagtgcggggatcttatacctttatcccagataggcataattccgtacaaccttgctagttagtaggtggcgacatccttactaaggcacttgattctaagactttttagacagtgtgattaatattgtgcctaagaggatgctattcttcgcttattaagcaaatgtcgtcaatgtcggtcggcgcgataggccactcgtaggaaggggtagaataggaaatacatatacagatcagtgatagagtatataagggatatattatcaaacaagtctcgtactatctatacgcaaattcgttatccaacgatatttactaagatacctttcggtttcaggccactggaggtaaacctaattaagcaaccaggccttgcattgaaatttgtacttggaacaatcatagaagctgagggaaggcttagtgtaaagtaaggcaattattatctaactaggcgagtggaaatcttgaactgtgatagagttttatttacctctaattcctaaagaatttacatttcggacaatgaatttatcgttagtcccttcagtagaagtaaatctttatatcctttaacgtgattaactaagtttgtaatacatttccgtagcatttgtaatagatataaataataaggttaatcgactctgactaatcttcggggtatagcgcagatattataatttataggatacgacggaagccctcggaggttaatcctatatataagtgataggggggaatgactttgtgagggacataagctgtaaggggcttggctaaacaatcaggataaccctataagggtacctaattgagggtaacacttgttgctagtatagaagatagagattcacggcttagactctgggtcgcttagagatatttgaataggtataggatgatagtacttctagaaattaatttagtacctttctaacgacgagatcgataatacagagaacttactaattaatattaggaaagaggctaatattttatatttaagaccagaacgaagatcttcccggatttctttatccgaagaacgaggtagatatcggcatcgtattccgagctatattcggaggcctttttaaaaagggactttcttctcctacgtgctttttgattcgctgcgtcggctggtttggttttaagtttaggttgaatatccatattaagattcttcgctggctctgaccgagagcggacaagaagtaggaggataaaatcaaggaggaattaagcgggcaattctaggattcgagtttgttcgtagtgacttaagacataaatagtggtctatagcgagcgccgcacttttgtgataggggaaatttaacacagggacagaatgttagcagcattagtcttcataggggatattggttggttaagtccatcgttgaattcgtgccagatcgtataaggagtggtaagtcgacccaacttacttaaacggggaactccattttctattcagatgtaaggacattttatcataataataggctcaccacttgttccggtcaatcggtagaatcacattagtctcgtctcgaaagccaaatttctacctgctgcggtatactttaagccaaaagaacagcacaactaggctacactatggtttcgtgatagactcatataaccgcggcagcctcaacagttcaagcgtccttgcattcatatacacttcggagatatataagcggcagcgaaacctagtataaccttcagctatatgataactaaccggtatttgatcacaggaggccatctccccttttactataatactcgtgacatagtgtctacttttgtaggcagttgcattttcgccgacctatgcgcacctgagaatgacctctcccgaaccctacggatctagtagaaagacacttgacaactcgccacttgctgcagatggtagtgactttccttacaagatatccccaggtaactttatcgttccgactgaagaggcgacttatcggactgggagcaataattccatcaagcttctaggcagcgccacccatggcggtgggtcctgccaggtgagcctcaccagtgatcgtgagccgacaaagaattcggaatggaaagttatcaagtcctacgaagggggatgccctgcaaaaggacccggaaatcttgatgggagtgccgagtcggaccattctctccaactccacttcgcgatccctgacggtattgcacccgggaaatacaccttggcctggacatggtttaatcgtatcggcaatcgagagatgtacatgaactgcgcacccatcactgtggctaatgagtcgccgtcaaattcgtcggacaacacacccaaacaatcgctggattttcctcctatgttcatcgccaacgtgaatggttgcattaccagagaaaatgtagacattcacttcccttggcctagaagtattgttgaatataacggcgacagcaaatatcgcccgcaagaaggcgaaccggtatgcaccggaaatcctacattcggcccaattcccattaccgatacagccgacaccggcgaggctagttccactactgaaaatgccaactcgatgccttgttcgtgtggctgccagggtagctaaacttgtataaatatcctgatgagcaatgtggtcctgcaccgcagagatatatagacgggagcgttcagacccatctagctcaatccagatcgtctgtgaagtggaaaattccagtctaataatattcacctctctttgttgattacaaacctggtttcagtattatagttccagcggggagcacatctgcgagataatgatagtattttgcccagcgggtatgattatgtgacgaactgagggagtggtcaaataccactaggacccttcgggactggcttattcatcgttcacccaattccccctagtatttgtacggtattccgggcacattcggaagtacggtgttgcaacacgccgaagcttatttgtatagacccctgagatcattcgaccgatctttaacacctacaatcaatcacctgattctattggacatgttcagtactagccagtacatcaattcctcatcctgacagtatataaaaatcacactctcaagtactcaattggctatgcccatactagtccgtactgtaacgaccacgttccgacacaacctcctggtttcagtgatcttatctgagtcatccgtccagtggcatccacataccataagctagtagataagaaaggacccacctatttggctcacgggattgactgcaaggacaacgcccagatggcgataatgaccagttcgacctatttagtgtcagcattattagtataacggtataacgtgggaatccgcgattacctccaatgcaatcatccacaatctctccaacataccaatgacagcaatcacaagcaaaagaagtgctattgcagagagataacacgagatacaccgcaacttagctcgaccagcagttgactgttaaaataaacaccaataccatacaactacacaaaggtaatccgctaagagaatatagaggctacccagataagcagatttcaaaaggaaggttccaacgtgagagactactattttcgccaaagctaaagccacagagaaagaagggcatataaaacgcagtaatcgaggtatgagtgggttttcgcgctgctggaagattatgcgaatgtacttcagcattattagctcaaaacgaagacactgtatataaccgagatagtattttgcccagcgggtatgattatgtgacgaactgagggagtggtcaaataccactaggacccttcgggactggcttattcatcgttcacccaattccccctagtatttgtacggtattccgggcacattcggaagtacggtgttgtaacacacgccgaagcttatttgtatagtcccctgagatcgttcaaccgatcttaagacctccaatcaatcatctggttctattggacatgttcagtactagccagtacatcaattcctcatcctgacatcatgtctcaaatccaaacagaagcaacgaactccttgtgttacatagaccctagttaaataggcgataaacgaatgcaaacgaatgcaaataaattgacaataccgatgggtcatataagtaagaactgattataacaataggtcgcaaattgagtgtagttaaggggctacactgagcctactatatttgttcgcttgaagagcgtttgcaaactaccaccgtcggaaccatgctccatctaccaatctgctgtacctggctttccttatgcaccaataataatatactgtctaaacagcacagatagaaaataggatcgcgggttccttctcgatttggtaggcctcaaaaaacagccaagcaaaagccaatgagtttgtccttcagcaacgagcatagtaagatttgataccgtgataggcagtcttattagctatactgaccaacaatttcaactctccctcgcatgaatctcaggtaaatatctcattctgtcacattagccgagaacataatgagacagcatgaacttacctgcaagatttcctcgacggagatactttccagttggcaaggtaagttctgaatctccgcttcctactcgtatatacgatttttcaacatcaatttcgtgataacatcggctagagcgtataatttcatcatcgcaggattcatttccgattctttaatttcgcagctattctcgacgcccactattgaaagtcagtttttatcaattttcgcaatatctatagatacctcactaatcttgatatcactagactgcgtaagtaggattgtttccgggcctagggtagcgagtactcgcctaagcccgcgcagatattagattccttctaatacctatcccatattaatttcaaatgcacctacaagagattttaactgacttaccggtttgacaattccaacgagttcgtcggtggtaatcgagtagctagaggctaaaatgtggctgactgatacctctgttagttcccagatcaacgtgtacgatacatcataataataacattcgagcaattttaggaagcttggatagatgacttgttccattagttctaggaaacctatagcgggagagaacggtttttcaagttattagatatacactaacttgcctttttccgacttatttcgggcgaatatcagagaacgatcttaggataaaccaatagtaggctcgaaagtatcctataggttctgattcagttgtgggatgcttacacttgggcgatccgggtatggctctattaaacctagtgtgatcacagcggtagccattttctatattattaggggttggatatatggagacaccgttgagtttggactcagctgctgattacagaaggccgacttatcaagccacacggtagaaggccgggtatatttggtctaagcgcggttcattatattatattgggtttgcagcgtgaaaaaatatagcgaggatagataagggtcaaagaaccatttatagctctaagatattattttaatacatgaccttcgtcttcgcaatgtcagtctattagtaacaatataacgacgttagatctttaagtgtggtagtgaattgccgcaattatagtaggttacggtaaacctctattgatcgggatttctatcactatcaattgaagtatagaaagttaaggtacagttgagcggcatcagaaaatagcttataattttcagtttattttaaaaggtctactttcaacatattcagatactgttccccttaaatatctaatattgtgttttcctttttactagagtctcgctgcagaaaaggacaataggaggtaaaattattcctagacagagatagatatcgtgagctagccctattctgctcctccgtggaggatattaagcaaattaaatggttcgacatttatcaattattttaataactaggaggagcagatagcataaagtaagccatcgagtggtcgatgaccacaccacatttctagaccccttagccggtagggtaggtccgatttatataggggcaggaatatgagctgttatgatagcctctaccgtacccccagttagcagagtgaatattagaattattaaagctaagggcatggcggcgttgttctaggagggcgtttaggttgtctttatgctttgagtggacgccatttcgtctccgacacatacgccgacagtagggtaggtcgtaattatatcacgtgcaaaactctcggtacttaaaattatcaacctataaatatagcaatatcggtaacgttagttaatcaacgtactggttttgtacatgaggcactgtttctagtatcacggtagtcgttaggactttggtagacatatcatttagcctaggctagatttaattcctctatcgaaaacacctgtctcctagctatatcctgctctgtggattagagatagtgcgagggaatggggtttgcgtggtaggggcttcttaccgtatgcactggcaaaaccagctaattcccaagagaagcgcgttttaggtgatctacctaaggatagaactcagatatttaagtagaaaggggggctcacaaaggcggttggcctaatatttacactctctcatatttcacttataccttagcctttaaataaatcatgctggcactaggatcaccaactacccgaaatatcaacgttagttaataaatagctttaacggtatctggatcatacacaataatatgaattgttacttaacacgtttaactacccaaagtttcttaatatagctacttaaactaaatcttattgcactcaattaatagcataatttaagagcttggtctgttagcacaacttctgtcaccgtatggcatatacgtatatagcttcctatagctgtcatattgaacaatttctttgatatttcggggaatcacagcatattgatctggggaatcaatagaccaaaacttgagatattaaatttctcgaaacataccctgtctataagcttgtttgctaacaacatccaacatcaggtggaaagttcgtatatcatattgtgttttggtggcaaaagaaaatatagccggcttctagcttccttgaatttggctgatactattgctttgctaatacagacttctattcatcaagatggccatttctaaaatttgatgatttttactggaagatgagatagactcgcaggaagtaagagtaggatttaacaatcaacatgccagcaaaaaccaaagtaaaggttctttcgaggtacataaacaatagtatatatttactatctacagggttatggttcaatttcttttggaaagatgaagtatatttggcagaatgagaagtgtcaatctaaataaaagcatgctatctatcggtctatcagcaatcagtctaaccattctatcgagcgccatttaggcgatcttcaatctactgaccgccgagggcttccgtacaaaaatctcttttacaattgaatatgctatctttctgggctcggaccaatttccttagataatagggatacatgatgaatattggatggaaatcggaaaactgaacaagaagtgatactgtgagacagggatggacgagaggactattgggcgcgcccaaacgtctacatacagactctttgtgagagttcacaactaaaccctagaagcaaaagggcttccgcaataccggaatgagagttagaataaaaaaggaaaagatggaaaataccagtctcgatgcaacggtaatacttctgaccaggctcttctctgtgctgaaaaccctgatatcacgtatcaagagcggtagatactcgagaacgccggatatccttatcttctttcctaacccgctccagcctatagaacttataaagtgtaagaagtgctaaacaactcagaagagttgctctagtaacagcagttattataatagccatcaccgaccaatccccaccttgagatgtacaaacattgatgacagtggtcagtagcccagcagcagtatataggtataggggtctagtccaggattagagttagatctagctttttatacctctttcacttaggatttgctcacttatacaaatactttgttaatcagccaggggtagtttcccctaagctttaggaaatgcatcagccacataagagccgcaataccactaataaaaagcaagtacgcaatagtgagtaatagggggttctatatcatatatagaactgtgcgaccggcctcattggcttgtaacgtccttttaacctggtttaaggtctacagtaaagtgaatgtgccgggaatgactagatagccggctagtagtgcccagttagccgcactaaccgtgatactgaaccgtatgtctatatctacttcttccctaagcattctagcgtagatagtttcattagcgaggtatatctggttagctctacacaggccgggggtcacatccgtagctaagcaaggcggaataagcataggttcaatttcgcgaagtggcgtcttttctgatcctattttcgctggcgtacttgtatgatcgttctacaacaaaggcaccaaaggagttttagtattaccgtaagaaggtaaatcaacaaagaatcgtatcagctctttaaatagtccatatgaaaggccgctacggtacgtggtctaactaggtctagaggtcctagtatagagggagacgcatttttgccttacggtaagacttacacagtccgggttccgaagccaaaaacgaatggcttctaacgaaagcgcgaaagttgctatataattagtttaagcgagcgttatctgcgaatgcaccggcggaaggaatctggtgcttaacatatttttggttcagaggggattttaaggcgagataagattatgccaacttcaacctaagcgtcgaccaccattaagccactgcctgtccctttcagataagagcccgtatataaggttcccaataggcctattctcttaccaatctctcaatcactcaatctctctaatagctgcctggcttaaccttattaaagagaatgaatcttgggatttagttgataccaactgcctagaacaactagtgtaggaattacctaatccaaaatattaatatccatccctactctacttttacggaaattcaaaccgcaataaagccttgcgggctctattcccctataacaacattacacagaaaggccctataggcttaatccgtctctatcttagcactaagaccgcctatacacagaatcctatattatttactaaaagcagtctatatctcgaacaaagcttaggggattccaagtagctcaagaattcaacaataaggtatcaaaccttcttactagggggtacagatgggacgttaacccctataaggctacagtaagaggttaagaggtaactcgttttaccatagacctagatcctatgtttattcctcgattccgtccctgacatccaatccgcaataaacttattacagagaccacgtcaatagcttacaattggcgataaggttattcccgctcccctgtaggtagtcatcgtcttgactaacagttaatatataacagaagccttcgtataggaatacgcttagctccaaaagctcgatactaggacagtcacgattctagacctacgtccacgtcacgggcttttagatagtatcgttttctagccactgcaaatattaatcgttaagcagcttagtatagtctaggccgagcacatttccaattatcgacgcttctcggcgttttatctgagcgctttctggagcacagaggtacaaacccacgaatggctcctgtatataccactatttaatcttttggaaagagcccgaagggactatataaggaacaaaacgatagacgattgccttcgagaggttatacaaacatgcattggctacctaaaggaggactttaataaccttatagcctcggccttcttaatagacacctatcccccttaaatatatggtataactataattcttaacttatactctcctgaacctaactaagaagctaacctgtctaggattctcgcctactgtggtattcgctaaactttatgagaagcgatacctaagtatttaggataataagttcaaatactatattactagcgtttcatcccgcttcgtacaccactttatataattgagcgtagtaaagatatcggtagccattcgaaaagagacgttatatcgcttatattactagtagggtggtcttcgctccaccactacttatttggtctgtctaagtcgatccccagagtatatactcccgtgtaagcatacaatatataacacttgtgtcgtaatcttcggaaagccaagtcgtcttagggagtaccatttcgaggttactcaatgtcccatctgtaaagagaggtccgacgtcaccgttcgccaactacctccaacgaagccccctgtgattctcactttagatagtggtggagtgcgcggcctgatccaactaggccttctacaggttttagaaagtcgcattggcattccaattgtatctttaccggacctgtgcattggaaccagtgtaggtacgtacgccgagtagccgagtcttttattgtggttgatatactaagaaacctcctctaggcgcattaacggcaattgacgtttttctcaattaatcttcggtcacacaatgtttcaatgcgttcctacacctagcgcaaaacattttttgtcattcgtccaaaaccccaattccttgctatatccggtggtttgcctcggtattcaacttgactacagatagcctttataatcccgaaggtctatcgaagattttgaaagtagccgttaacccatctcgttgtatattcgatatcgccaccgccaatcctatgggttgctggatcgccattgtagtaagccgtatatctgatagtaaagcctacgtgttagccaattaccaaggaggaagtctacgttctaccaataccgcctacgagtttctaactccatataacgaccgataaaacccttccttacttaacgcgtaagtgaccgtttacagccagttgatttagatagtggtagtcgaccttgctaatagttagcgtttaataggtcgatatacagtggtgtagcgcccatataagtccaaacactataagacatttcaatacactgacattttctagctacttctaaccaaaagagttaccaggcctttgcctacaagacggtagggtccgtgcgaataacccactcgccattgctttgcgagagtcgagcattatctggcctatagcgaaacgatacaaccttctcctctctatcagaacaggcttctccacatctccccctagttatctaacgggcatactaggtcgactctgggagggactcttccccaactattccgggccataatatactctctatctatagacggaaagcaagggtttttggaagctctgaattacctaccctatctgtcgacgcctgatattttccaactagaccaggtaatcgataggacgctccctgaattagacgatatatactcgctggaagcgatgtcgaatatggattttgcagttccagctaagctcgtaaggaccattctcgcgtcggcaatgtttttctttaagttggataaaactcctatctagggtaaggcttcaatttattatcgggggtctgttctttattcaagaccaaatcctgccgagatcttatagcgggtgcttatcgagttccccggcgctagatttaagtctggtcaggatcttgatttaggaagtatagatctagtcgacctttgccggttttatagatacttcaggaagcgcgttgattttcgggtcaccagccttaacgaaatagtcacaattgaaattgctaataatacctttcgcaaaaggattagtggtttccccaaatcagcgtaggaattcctcaataagcaaaaggcttacgcccagtttggtcgtatagattatcagaatcaagaatggccgccgcagagatcttattactgctattgtgggtcaaagcgattagtccacttcctagagcctactttagggcagaaaaggcggcgtttatgaactgggtgaagttatggtttagcgctcaagtcagttaataagtagaatacaaaatctagttaggtctcgacgggttaccccgataaaatgcaagacgcacggaggctaggtatactctggtaatatcaataacaattagaatcatatgattatcctagatagaagtctgaattcgaactgcaggatataatctatctataccttgtaacccgtggacacgtgttatagtcgccctcgtttattgaaatctaaaagtgcgagtaggtggcggggcgaagacagaagttcgcccgctatcaaagaaccatacgacgtctctataataccaccccttagtatagcaatatacttggcgcctgggaacattggtaaaattcctagagactaacttggtactataccggtgctagtctacggctaagagtgcgcggtttgtcaacgtggtgagaatgtaaggcaagccgttcagaaactatcttagagtacaaattgactatttcgcccatgaaatggactttccgttcttaaaacgctagtaactcccgtcctctatgtacgtcggtttcagagagccgagacgtggatagtccatgaccgatatcaaccctttccaacatcgaactcccggttactctcgcgacaacacttcaagcatctacagtcgatccacggacacagccaaagatgctatccctattaataccataccaactaccctataaatcaagctatctcttcctaagataaatttactggaccaccaaatctctatggcgagcggatctaccatggccttggaaacaacccggccacgactaagaaaatccaagaccctgaccgaaatgtcggtttccgagatgaaggccgaaagaatgcagcagcactgtcacctagacagaattaaatctgcggcttgagcattttcacggaacttgaaagtataggagcaatttcaggattcattctttatattcctactcgttttacgaacggtgcagttcgccatgcgcttgatgttgtaggtaggatgcgcggacgacccctaagtacttttgaactccgcgtgtaaaaactgtttcactttagagacaaagtcgtcttcaacgctctgaagcactctcctaacagcttccggaagcaaaaccaaccgccgggctaaatgatcggggttagcttcacctaaagaaatttgtaagcaggcattgtgttttagctgggctctcagctggtcgaactctgaaaccgatatcttcacgaacttttgaatgcgataaagtcttttagagctttcgaagctagcgatacatttcgaaaatttgatagcggcgcgaaccatcttaaggaatgttttccgatcgtagggaatgcggtgtacagctgtgtggcgaatgctactaatcacgcgacgccatcctgttaacatgctccaggtcaactgaaaacattcgtccttaacttttccttgatagacttctaagagacaaaagaatttgtgcaactctaaggcctctaggcaagtccatccggctgcgagagactccgatagaagccaacgctgaaggaagcagaaggcatgagtttcgagttattgctgtatggcttacaggatctggtattaagcgcaaaagggaaagtagcgagccaaaaatccaggtagtaagattatactttctatcacccctatccgaagtagttagctaattagtaagcacgccggttatcaaattcggtgacaaacatacacttatgtagcaaatctttcgggaccatagaggtaactaagttgtgaattttagcctttgggggttttataaataataacctaaactaatgaagcgacatatagcctataagctgctgaattcccctagtatatatcattgctaaatgtaagaacctagttgactgaggttggggtaccgtttaagtgggtagaatgaattcaaaaattcctcatgtttctgagtaggcgatagcatcaaattgctgcgggccaacgagtttagattatgacttcaataggggtcggtagctctctccctcatgttatatatatccccaaaaccacaattgtattgcaaggctgcctacaaaagtcaggtatataacatcgaactctttccctcattccccttcacgatgcatatagcgtttctaaaaaatattacagatgatcgcactgggggtcttcattgtgggcgtcctactggttacaattccagtggtatgactctttctctcgccgtccgagtccgacttatgctaacaaggtcactccgtccactttcattccgaacccacctcatccgcttgtcctcagtcatctgtcttgaaaggagttaaagcaacacaaagctctggaagtgtcaaagccatcgaagcgaagactgcctaacaggagagaccttccactgctgcttccactcctgttctgcactggtttcctcggctcgcgatttgtcaagagccactcttaatgaaacgatagctcgaatcaagcgcgggtccccagaagggctgtttgccgggttgaaatgatactgcagagccagactttgggttgcgtccattgtggtgctgacaagttggtggaagctctcaaaacacttgcaataaaaatcgttctcaagtcccttggagtatagaggatggcggtttaaagaaaccgggggggcagaacccgtcatcgacgcgggatgggtcttggaaggacattgttacgatctggtcattcgatctgatcggtagtgaatataggaaggatacttctttgcccaggtgatatcagactttttatagcaaaatacatacattttaatttactaatcatagatctgcatctcgaatttagttaaggctctcataggtaaatggtcaccccacataccttgtgtaaccccaaaaacttttaccgatcaaccacaccgtgtagaggacatacagacatacatgtagcatcgcccagctcgcacctagcaacgttttctccaccattagcgtacgcccgtgtatttgctaataccctcacatcccccgaatctacatacataacaattttatcaaccaaaaactgtcgattaccataggtcacaggtcccggtgcaagttccacggggggtcctatcaattacccgacctaaattatttaatgtaatgtgaattaacaaccctccccccaccacttctcttatatcattgtgcatgcaccttcaatgttaggcgcagggcccaccccaccatcttttattattctccctaattccaaggcattttatgaaattgataaaaacggtgaatacatatatgtattgagctagaataatacttgaaaatatcgaagctctataactgtaccgtaaaggtcaatcaacaacatttaaatgttaggcctgtatggcgaaaatgtccttaagtactccaaaggctcttctgctgtattagtgatttcagtactttttatattgcactcgatcatatcacagattgacggtcgctaagttcgtggctatgtatttacatgtaatcaatttgcctcaccccaccccgtcgatgactctgcttcccccgcacctagtatgagttggcattgaatcgcataaaggactactgtactgtcctacgaattcggctactcgggctccagatgatcatcctatttaaccctgaagacaggtttagaacccaactcagctgaataaagtgattagctgtcaccatctgtgtctactttggatgcatattgttcgcctgcaccgtgcactgatcgtcgtttcagatcgacttgtacggtgtccaaacgctacatagtactagatacgtattaccactcgtgccaataattcttactgatcggcaatgcacatcagcgaactgagactaccttagctaacttcaagtttgcctattcatttgcaccgaaggcttctttagaagagaaaagattttcccatcaccagcaaagggtggcaccatccggcgacaaattgttccccagtaatgaagtcagtcattcagtcacaaggaacactcgtgtttagtcaatatcgatgaagtggttggaatattattcgactgtaccatgtggctggctgaacactcgcgatccactttgcggcatttctcgcgaatggacgttaccatgcacaggaaggtttcgctcctgccggcttgaagttcgcttggatgaatccaagtctcaaaatccacacagcttggctcaagcgtagatcatagctgttaggacgccgataaatacgaaggaatactgcgtatgagtgctgagtaaccaacaatgtctgctatgggagggaaaggaagctattcatgatgctggtcaggcatctttacatgcgggatgtgggtcctgtgacgacccacacatccacggtgttgttaagttggcaggaaactttgccgagcataaataacactagcctcctcggtggcctatcattgaatccacgctcatgattcctgcagctctgaaagttatcttttattttgttgaacctgattctggactgtaatatgatgtaatagttggcaatgccaaaattattgcgcaattcgtgtaacccggcagcggaaagtttcaaggaagtccgaagaaaaccgcgagactctaaacttcaaagggaaaaatttaaaatagcatagaataaaatttttgagggcgctgtatgggtttgtgaattaagctctggttatatctgatttgtaacctatagttgtcgctgaaacacaggctttaaagtctatgtagttatctgtcttacgatctagtaaaggcattggtattatcactggtcggcaaagagtagttttacttcagtgcttgaaagagtctccgtgtctccagcacggaaggtgaacctgggttgttctgggcactgtttcaggcaacacagtacttgcaggcggaggggaagaacgtaaacactatttacggtaatttaccgtgactcatccaggctacatagcatgatgggatcttagcccaataggggaaagtggcgcgctgtgagataagaagagagagtatcgaggtaaatctgatttcgaatatcactgtatagcctcgaaaccgctgtagagagtcgggtttcgggacgtactgtacaaatccagattgcgcggacgttgtggttgatactattgcgatataaaattattgtgttgtgtgccgagcgggagctaacgccagacgaatggcggaccacgggggctcccgagccccttgccaccacaaccacgcggagaggcacggggatcgtcgtaacagaaaaccttgcaccaacgaccacggtccggaccaggagacatgcacgagtggaaagcgagcagacccacgcggccccggagcccgtggaactgaccaataccggaaccagcactggacgagtgacaaccagagagatttggcagattatcgtacacctgcaacacaccgtcgaggagcaaaccacgctcattcacgccacccggaccgaactgagagaagtgaaagataaccagaacgagcatcaaactcagaatgagaagctacaggaagagattgcagcgctacggtcgcaggtaaacgagaggaacgctccaaccccgacacgatcatgggcggccgttgcggccagcacggacaatccgcaaccccgggagacccggcgacaaactgacaaagacgagaactgcgtccgaatcagcacccagcgatccactgaagtgctgggcgcagataataacggagacgcgttcggccgctacctccccaccccgactgcgaacgcccacatcaggacggcactgtcgaagacgctatctacccaggacgcacaggttacggggattgttgctactaagaccggatatgtgatccccgttcaagaaccaggcgtcggccgaaacggcccgcaccaacaccgagtggctgaccgggcttggcaacgacactagactggtgaagccacgtttcagccgttcaccataccccgacctttgggtaggacctcgaagacaggaaaaccgaagccatcggaaagatcgcaaacgagaaccacctccctgaccgcggatttcgaatcgaagacatagcctggctgaagaaaagagacaaagaactggggacattcgcctcaatgggcatctggttcgactcattagaggcagcagagtggatgctggacaatggtctattgatcgatcatccgcacattcgaagagtggaaaagtgtgagatcaaaaagaaacggtgcttccgatgccaaggattcggcgatctagcgtggtcgtgtaaagagacgcctcgatgcggccactgtggcggccaatatgagcgagaaagatgtcctccgggaatcagagagcgctgcctggaatgcaacggggaacgtccgactggagacttgctgtgtccgacgccagccacggcacccccatcgcaatgctagagaacaaccttcgaattctacaactaaacactatgaaatcgggggcgggcatggaagctctcatcaacgaccatcaaagccagaaactagacgtgctccttatccaggaaccgtcgattactgcctaccaaacacacgtgaaccacagcgactatatcaacccacagtggagagcgattcggttcgattccgaagccttatctatgtcaatcgcaaactctcaacctcctatcaccgacaagtgagatgcaaccacccagatatgaacgcccattgggatatatattccaatcggacacctcgtcccctttcgttgaaagtctcagaaatccgataaatggaacattgtagaacttgcagtaataaaaaaataagggtagaaaataaaataaaattgaaataaaaatttaatgtttctatgttcttgatcacacgtccgaaaattgagtgttgacaactatggccaagcttcaacgggttgaccgacggtgatccaacacaaccaacgccactaatactcgtctctcttgctgagctaaagacataaaaattgtcgctggatgtcgctgcaaataattgcggtaaaagaagatgtgggtttcaacaggcctcaattaagaaatgtgtccttcaacacttccaaccaggtcggtgagtgacagaggccgaaaagcctataaatacgtcctctacccctgcaattgctctactttttattcacttgattctgcaaagtcgagcaggcttgttgtgtctgacgcactcgataagctcccccctttgatcgagtactggaatttataccgtactgacatttatagtatacatcgtggaccagcaaaccagacagttcctgtactgtaagagacgtggttccaagcattcactgccacatttacgccagccgatcggagatacgagatttggattagctggtcaaggcgactatgcgaagacgtctctgctatagcgagctgatctactgtcgcggctctggttgaccacaaatttcaagtgcaactgctcacactgtaggtatatgggcccacaaatccttgaaactgcactgacccgaaagacgcgggacagccagatccgtagacgttcgaacacaatgcaccagagcaagggccactcttcatccctggtcttgaccatcagaaaatgtgagttatggaattccacgctggtctactggctaataattgacagtgaacctttgggagctcaccagagtggccctgataaccctgcactaccgtcagtgcaaagccatggcttacacactattcctagccccgtcgcttcgaacagtgcagcatgtcctaggtggaagattgcaaaccaagatagcgagtcaacaacagggtgcggccatccacgtgcgaactccgttgcatagaaccttgcgactccaatttccatgctaaggtgaatgagatctaacgcctacagctgcgctgtctgattatccgcgccaagccttattcctctaaccacgaacaccactaacatattcacactattgtagaggcaccccatcatcgacggtgaaatatactgtggcgagtggcctattccgccagatcgaggataagaccaaggtggcggccgaacagcgtgctccatcgcatcgcgtcttccgccttcgtccccaccgccttcgcactgttgaggagtcctgaacctctggcatcgcgacacgttcatccgccatggaagtgcaatgtttatcgcgggtgggttcgtacagtaaaacgcgtgatcaattgtactgacttcaggccaagacggacttctgcaaaatatatggagtgaaaatggacggagcgcgtctgtatctgcgatcgactgtatagaattcagattcggagagtgaagacccattgttactcgacgcaaggggtcagaaatgtcgggacaggccgagacgcgaacccctgaaccgcccgaccgcgacgaacacgaaaaatcgccgccaccattattgagaccgagacgcaccaccagaccgcgtaacaactatggccaagagcaagaaatcgaaatccagcagagaaatgcgcgctctcagcagaagaagagaacccggggcaagccagtagcccaacgtgaagcggtgacttcggacgacgcgtcgccagcgacttactgccattcatagtccgcgtaaagacccgtgctgtccatcccacgcacatgaacttgggcgttgatgagctagagcttccacagcgtccccgtttatggtctcattgaggattcgtctgcgataaaaagtgtaggcaaggctggaagaaaatataggcctggaggaaaacataggcctggacgaggccctcggcggacaaggtttgcgctttcttgtcacaattgagttttccctgaagaagattccatttctcaaaagaatggcccgctccttgtcattgagacttagtttggaatatccgttaatctcaaccagcggatggtccatgtcagagctgatgtacattctatcaacaccattctcctccgagactagttggtccaaaagctcactgatcggttgaatgggcggctgtgacgatgctcttgtcgaccatccaaagggtggctctcccttctttatcagttgcaaaagacagattgcatcacttcggtgataatctaagacatagcaccatgcgagggctcttccaaatggaataagtagttcctcttgatgtctttgtttaaaaatttcccatccggtctcaaagacgtgtcgtacagtatctctgtgtacgatatctcgccggataatctgactgagctggatcagcactttgtatgttccccagtcggtctttggatgaagatatttggcgaaagttgactcgattatttgcctttgtggtctttgtgcttgcaaaacatttaaaatccggcggcagacaagtattgaagaaaaaaagtcttcgagatcttgcaaatttccgaggatttttaagagcagttcaggaggtagagcaactagtggaggtatggcgttgattttgtggacgtcacttgagtctgcagttttcttggtgttcctctgaggcagttgcgcaagcttggagtgtatataggccaaattttggcacgaacgagcacaggtgttctcaggcattttgatattggtataatggtgtgtaatggattgagtcgccttgagggtggccgtggggtttaaatatcagcatgtgaacattgcaccttgctcagccaagcgcttcgcctcccgatacactgattggtggctccgatcacttagcatcaagtagttttaattgaacctccaaggagagaggagggagaactgtgttatgcgtctgagaagacggaaagaaatggcagaatcctgggtggcctaagtgggattagcgctctcctaggaactatattaatccgagttcgagtttggatatccagattgcaatgagcagcctaatcttatcccctatcctccgtttcaagtgtgctaatagagatgcgagatctcatatttatttatttattttttttttggttattatagtagaacttatgcatggtctaacaatcacatttgttgaggtccgcagctttaaaatggctccctactgtctatttgccttgtttgctggatcaacgttctagaacccctggagttcagctgtgggtctgtccgtctagacagcttggccacacgttgactaaatctttgaacccgagactatcaagatactttttgcttctacatttttctcattttgatggcagtaaactctacaggtttttgttcatcgagtgaggctttcaacaaagtggaaaagggtgattgatatatatacctcctcaccgagtgtcttctgaccctcaacatcttgaggactgatcaaatttgcccgaccgactcgttgatcactatcctatgatcgaattgaccgccaacaacggccgaagaataaccattccccagtcaaaacctgactacattgattgactactgctgtagtaaaactgtatacttagtcagctgcgtctgcatagacttaaaacaccaaagattgatgggagaggtattacccagatttttgacattctcttgcggacaaaatggatgccccgaacagcttgccagaccaggaacatgaaagcaacaatttgttggcattcgggcttagtgaagctggttcatccctcaacaactttgagcctcgaaccataccaaactctcccatccgggagcatagatggtaacaattttaaaacaaatttcgctctgcagacaccattccgagctgagacagttattgaatcatagaaaacaatgttcggaaaatatcttatgcttttttgaaggatgcttttctaaagagtgatgacgtattctgatcactcgccggaagtcctgccacgccacatcaacttaatgcattcaaccaatgtcctccgttcttgctttagattattgatttccattatggatttgcatgaacttctcaacgatgcttcctcgcccacagcgtatattcggcccaataaacaacatccgcggcaatcttcagttcagactaacatgctgccatccttttcgacgttggcgaaaagcgttgactatgcaacaaataatgatagtcagtgcatcttgagtagatatttcccaatacttattcactcacagtatgtattcaggagatcgatccgttcaagcagcatcatgtcgccgtgatgccgcccacgtgcccatctgtcacccttttcaaccacatcatccagaccccagcttcagccagaaaatgagattcccaacagaccaccagagcgccaactcgatatgttgctatccgcactattctatccccaatgcctgtccaggtagttttggaacacacgttcagggatccttcccctcgtcagcgcccagcgtgaatcactactcttccctcatctattttccttctcctcccgctactaattctgcaagcaattatatgtgcacaccgtacacgacctcgttttatgatcccatgtcacattgctgttcgtttcagccagaccctatcgagcacatacacaaagcttggggccaccagcaactggttgaatctccgcttttggcccaaatagtcagccagcccggatatcataaacgtgtcttcccgcgaggtatccgtgcaatgcgcaagaacaacaatcaatatgaatgtagatcttgcgacaggctcttttcgcgcccctcagcactcaacatccacttccgttctcacacgggcgagaagcccttccactgccctaacattggatgcgacagggcattctctgtattgagcaatatgaaacgccatacaagtgactgccggaagaccgctaagctctagcggcgcaaatgcaactccctccatgttctctcagaagattcatttagagaaaccggttccttcatttccaacgttagggcgaacctgtaaaccccgattcgcgcggctattgaaaaatttccggcaagtgatctcactgatttaccaccgcaccgaattttccaagcactatagctcctgtcagggatatacatgaagtatacaggacggatggagttatgaggtatgcaagacccacatggcgtatgcaggttcccctgaacgcgaggaagctacagtaccttttttgcttcctcacgctaggtcttgtatctagagtcgactatatctttctttaattagtcattactcatctgaacaccctgtcttcatctacggacacgtgaacccctaacagtgatatttctaatccccaggaaatttaaatctacccctgggatcttcactttacgttcctgactgaatatgaactggctttgggaacaccttggttagatctgggagctattgcgcttctggggccccacttctggatcctagagtcaatatcttgtctgctggggtcgcggaaagccctcacaagacaccttcaccagacctgcgcaaaaatctgcggcattcaattactcctggaaaggcaatcaatagccccaggaacatgactttggttcctcgaggtggggacacaagaccccagaacctccgttgggcttcctggggcctacgaggctcctagaagcgcttgtatgctcccagaaagcgcactaaagactccgggagcaagagaactcccagggccaagatgtgcattcccggggctgataaaagccatctctaggaacgagactgatttcttgatagtgacaatggacagtcttacaagccacgaacgaattccgtgttgttgattctagcgtcacaccatggcctaaggtctttttattcttacatattggtggcttcgaatggtgctggtattcaatgctcaacgtctagtatcaaatatgcaacacaaatactgcatacctcctaggagccagcagtagaccaagaaattatcccttattgtttcccttttgccctgttgaggtcacttcgtgtctcactttaaacgttgaggaacgtgaatggtccggtcgatagcatatacatatacatgttccaccttgggtatatatatgttgtatccaatcccgacgaaaaagcagacgatcacactcgaattggctgcattctcatcatttgatagcaatgcattgcaaagatccctttctcggggctagatatggtttgtatgtccctttattaaaattgtctagcaatttgacctctagcttagataaactctcggacaatagatcgccccaattttggaagtaaccggggattctagcgcacaaatagaggggttaaataactgtatattgctagtcaatatccctactacgtcgttggacgtattcactaggatattgttaggtaaaaaatccggatagcgaagagtcgggcgacatatacttactataccggactgtcacaactctttatcgcaagcgatccgagtcgagacagatgcaaccctcacgactcaggatgatgcgaccgacccagtgattcctaatcctatgtattcacagaatctacacagttatcccgagtctatggatatcctatggtcgcacagtagtattattcatctccaaatcatggactcgtcggacttccactcgtcggacttccggatcctttcagatattagatctgccctactgcctcgaagcttccatgcgattcgatgtcttgaaatttcattattacatgctttccttgatcatcagattcaaatcctcgatgatgagtggtatgatcaatggacgagcttgtggaatgtcataaaatgtctgaaggggcttttgcatgtccaagcctggctgaagatggaccaagagccagggaatatgatgactgccgaccaggaggcaagattatttgcgccactcatggaacttggttggatacaagatttcaaaatcgagggaacatggccggcaaatgaaggtttcgaaagcttgcttcttggtgggccgtttcagacgacgatagctggtggaggcaaccgtgacctgcttgttgggaagcttatgactatattaaatacatatggtatacacatgacttcacgcccctacccatgacacatatttcaggaaggtagtcccaatagggtacatttgtggcggagtaatcattacgatgggttccgtggctaggacagcttttcttggtatataagttgctaccaggtattcaggagcctaagaccatggatattttggcagagatacgaggctacagtctctttaataacaaaggtgccacttctctgaattatgtcgatttctaccctttattcaataattccaagatgcagagtcttcgtaaagtgatttgcaaacgacgcacgcaaacatgctcacttacgaacttccaacttcgacgcaacatggccttctctggaagcaaagtcctattattggaaaatgagtgggagaatcatgcggcacagaaggaagtccctaataaatcatcccaaactgatgcgagcagaaaggaagcatatcacaagaaaggtgaatctgactccctagaatgcactaatagtaaagtaaattactaagcgctgactaacccgccatcattttagaaccgcccatgcccaaatcgacttccgcaacgtccgaaaccaaaggagctcacagacatgatagtcttaaaatctaccgcgaaggccctaataccgagagtggcgaattggatcctaaatccaaatctgaggaagtcaaacgccacaacaaatttattgctgatcatcatgaaaagctttaaatttgtctgactgatgtcgactttcttagccttccatttccgtcatgattatcactccttactaggtgtctgagctttgaaggtcaatgtgatggatattggtttggttattttggtctattgccttggaagaccctgaagaagggaaatttgttcagaaacgtgccgaatggacgtttaatacagattctaatagcggcgtttcaactgcagtcgcccttaatttgcttaccatcagcccgtatgccctttttagatatatacttcttaccatattaatgaacatacttatctgtttacttgcaatattcaagtcactcttttcgttcattatttcaaaggtcgtgttgtaattcgaggaaatgattgattctcgtatgccaggtagccaataagagccgattcttccctttagtaggacgattgccaaccatatcggcgtgttcaccggaaatgggtctcgcgggctgggatctttgtgtgctatggatgtttgctgcctagcacgaaatgtaggactgaagcttgccagtgtttctataatctagccggtgatcggagacgcaaggctcatgtcgccgaggtctcaaacttccgtgtcgccctttaccggatgactggagctgctccattgtacgcccagcccttctatattaggtaagacaagcgtagataaaggctggtccacgggttacagaaaagatgagtaatttcgcctgacctttcctctttgcttggttttttgcatgatagcttctagcccgatgagcgtccaaagggcgtacgagatacgtcattcataaccaccaatcaggaagatacaatcaagcatcaattttgaggaattatcttgatttgggccaacatatttcagaagttgttgcatctcaattacgaccagcagcagtaatcaaattaccttcgtcgcttttacgactagtgaaatgcgaatctcagtattcctcaggagtttccccgccctttcgaagcaattcctggtatgccttcgtcttacccaggttgattccaccggggctatgctgagcactaagtaaaccggcttcattaattttactcacatcactacaccagtttcctttgttttgactactaacgctttaggtccagcagcaacactgctctggtctttttgtttattggcctggtcatcgccaacatcttgatcaagaccttgtcccttcacctcgtctgagacattttgggtgttcaatgcactgccattaatggttctggcattagtctttacccatagactctcggcactagttgccagatagcccacttacaacttataaccgctcatagggtcaggaatatctttggtgttgaacatgttgggaggctggtaattgaattattcgacaattggcctgtcttacggtaagtgacaatactaatcactttaacaaatatgcgatctctttataggtcatgggtctacataacaaaaccgtgtaataatcatcatacatccgtcatctttaagcttcaggcgtattacgtactccaccacgtggagtatttgacccactctgttgaaccaagttcagaatattttcaccattcgatagcggatatatcaacctttatatttagtaacaccagcaaagttatgaggcatagtatcagatagatgcgcgtcattagcgaaaatgaaataacgccggagaaagtgggaacaactaactcgtcgcattccaatgctagtaaacgatggaaagaggagtctatattcaggccgttccacagtcctggaatgggtaatagcacatcaaaaatggcacaaatgtcgacattgtcacagttatggcaagcattttgctttacgcttgtttaagttcggttatcttaaggataaacatcgtcaataagatcgtgcttagccattgtagtttgacagcctccatatcagcggatcctggttctcttacagttggggagtttctaaagttccggtctctgatattatttcattattattcgatccatttgttacgtaccccgcatctacgaccccaaaaacaacttagtctgtcccgtgtggcgggtgttcggacgagtactcataacacattgttgagagtgctcatacaataattgctttggttttggctttatgcgtatccttttctatctatgctcatcaaatcagtccttacacggccctaagctgcgcgactctgtatgcaacaattggcttatccagtaaatgtccctatgactgcccggcgctttaccggaacaaagcctttagccttcttcttattgctcatgtggcttcgcttttcattagcttttgacagaaattaggggtatggtgaacgtattggtaaatccacgatgataccattctctaactaattaaaaaacaacagtggtccgtttttgacaatctggccggacacaattaataagcaacaatgcatagtctaaaatcacatgattcaatggtactggactcggtaatccatgtggtcagtctgtttctgacagctttcgcttcagggccacagcgtgcgacagtgcgcgtcaccattgaacacatctcgatgccagtcaggatcaccctaatagtccattatgatacaagcgcgtggtgtaatcctctgattaacaaattcgaagattgttcaaatcctggcgggtctgtcggtattgattgtagttgtattacacgcatgaccctatatctaactggggatttggagtgcatggtgggaaattcttggtaggaagtggtaggatttagagatatcggaaggggtattggtaggtagattaactaaaaatcgaggtactgtagttgtgcaaattttgtcggggcgcatcaacaacgagaagcggtgtgtgtgaaccgaaggtaggtcggaaggcacggatcaccttctacaagttcgagctagatttcttttctctcactccaaacgtctccttctcagggcctttgcacttctcgcagaactgggtcaatatgttaagctttcgtaccttgacttctctcacctgtttgacgtatttcgctttcctgggaggtaatgtgcagactcgtggttcccagcttggggacagtatttctaagcgcgaggttctctatgttggtggactatacatgggcatcacagcaaagcaagtcttcattctgaccaattctacatgtatctaagatcttcacacaggacaatgtcgttaattctacatcaatggctctggtagggcaaatttacgtcgagaagctttcccctaagccaaccccggcgaacccaccacttcccattatctttattgggggcgcggctcagaccggcacgaatttccttgataccccagacggacgaccaggatgggcatcctatttcatctccaaaggtcacacagtttacctctcagaccagcctgcacgtggccgctccttctggtatcccgaacagggaagtattgggtaccttggctcccccgattctgtctctgatattttcaccgacgtagcaaacaacggcaaccaatggccacaagcgaagcttcacacgcaatggcctggcaccggtcgcattggcgactcaacattcaacgctttctacgggagccagatacagttccagactgatcgcttcataagcgaagagcaaaatgcgcaggcgtattcagctctagtcgaccttgtaggcgactgttatatcatcagtcactcgcaggcgggtgcatacggtatcttcagcccagcactatgactcgctgaagtgattaacgattgagtaggctggagggtcggagacatgcgcccaggcctagtcaaaagtattgtccagctcgagccgtttggtccaccgttcacgctccgcccgccgtttggaaatcgcccagctttcgctttcggtctcaccgaccttgcaatcggatacgaaccttctgcaggcaagaatgccgaaaatattgagacaaccatcgagccagcaatcgacgccgaccacgacgagtccatcatgcagaagtccccagcgaagcagttgacgaacctgggcaaaatcccacaacttgtggttacaggcgaagcatcgtttcatgcaccatacgattactgcaccgtcaagtacctggggcaagctggcgtagacgttgagtatgcggatctaagcaacgagggtattcatggcaacggacacatgtttttcatggagaagaacaaccttgagatcgcagaccgggtgtaccagtggctgaaaaagcactaatcaacgcataatcagagtcaatttcctcactgcgttgtctcatggtgtttgcacttttaatgtaggtcattgaccgccaggatctttcttccagtgcatgtgaccacactgtggctttcaataattgcctaatccagagatttgtgagcgctattcgtgaacttgactaatcagcgaagtcgagagatcccttataccaagtttgcaagcgatgtcaaagaacttggctcgagagataagtccgcggatttgagcctcagtatttcccatatcaaccccgaagactcgacactgtgctagctccgtcatggttgttgggtccaagccctcgagaattcgtcagctgtatgctggtgatgtatgcgagcggtcatcaatcagctgcctctctttcgatagttcaattcacacccgtttcttcgcattaggcatcaacttttacatcagccaatatgcgcaatttttcccttacagcccgaagcaatttaccgacctgttggcaccgatttggggagaagaaggaaggtatcacacacacgataagtcgttcgttaggaccacgtcatcctgtcacttctaaggaaaacacaacgtataagtatagagcacattttctcgttcgatgctctaaacattgtggcaggataccagctgcatatactgtgcgaccatcctcgcgcaagggaaggctcattgaccccgaccctagttcacaacagaaagcaaactagttagcttgagcctccgagtctacaataagtactgacagtgaattgatagtggtgacatctaacggcgtatcggcaatcatgcgtctcggattttgcaagtgccgttgttgagtcaaccatgaatagatcacattgcgaaaatgtggaaaactggaaaccggagcattcttgtgacatagtatctttctgaggccgccataggccggatagacgtagcggcggcttgccactcgttagagagcgaaatgggtctcgtgcgagcaaaggaaaacacaaccgcggatcgggttctagctagtgttctgtcgccaaagcttgcgggatgttctaaatacctgatatacaccaatagcacctcctaagcaacaaggacccgttccatctccaggatgactgctatcaagtctggcgttgtatctcgtgtctgaacctttgcaggtttttggaacttcttctccgaaccacaaatcaaactccttcatccactgtccctttggccgacactgagattcaaatcgtcggaacacttaacaaatcatttcacacctgtttattgcgagatacaagtcaacaatgtcgtatttcaacatcaagagattaaaactagtgagtagatgtcatctgaatttagattgcaagaaccattccacttccaaattgtacattgcctcaatcccgtaaagaactctctgggtgtgtttcggcagcaacagaaatcggtctttcagacctacgaggcgcagtcttggcaaagaagcttggtgcttgaagttccgtcttgactacgttcgacggcgctctgactttgggagtctattttccaggaactccaatagacggcgaagcttgtccacgcgcgaaagtccaccgatacagataaagaattcaatggcgacgcggttcatccggagtagagattcatgatcctgtgaaagacggtggacagcagcgtggcggataccagaaaccaatctttgccaatttttgtatggtattagcggcttggcggcaagagctgcactgtattttgtcccgatgtttcacgcactaaaggtatattcaatccttgtgcctcccttagttttctcaaccgcgacacccatatttctgagagtctggacaaactcatctagtgagccagcaagcccctgtggagagagaccgtgtctgctgttaggggcgtcgatgaaaagccaaacccagttcttcagtgcagctggtttggagaactcaatggactgcatgtttcagctgccaaatttggcctggagctctttctgcttggcatacataatccggggagctggcaggacacgcccttgcaaatgtataagattgtcgccaaggttgattccgaagaagactagaatagaaagtgattctgtcatctgctagcgtcctccaaaataatgactgtctagaacattatgcccttctttgctactcctaccgcgccactgcgctgctcatagatagctggggctaacgctaaattcttgttggaaggtgttgggcgtattaagttcggaacgctgattgggctacatgttcgaagtaatggctcagcaatgttgctttccaaatattttatttagttacttcaaggcccatcactgtccagatccgcttgtatgttaactgttaaacttagatactaaatactgctgatggcaagaccaggaacagaggatcgtttcatttacacaggataggtaggttctgttggatatcgaaatcaaacacctctatcgtcgctagttattagttaacgttatctaatcactctatcttagtttcgttcctagggtagaccgccttttaattctgcccccacattctacctaatgtggacatcgacaaacatgaacactcatgtctatcaatcacgcctgtctgcctgcacgcgacacaatacataatatttggtctacctaccatgcgcggcgaagtacgtgctatttctttgccgctcagtgatggccgcgtttattgttcccctcaccctgtctatttcccaaccctgagacgcaaaatacaatgggtctcgctgtgtggcaatcaatacagttgcattagatcaagccaaacccctcatatgattgaagctgatgtactaattgaatagatatgtcatcttcaccttggccaggctggtacccagttgggtaacgccgcctgggagctgtaagtcttactgcttttgtgacccatctggcgatgtttaaccgctcgatgaggatatagatatctgctcgagcatagcttgatccccgatggaagtatagatcccgatgttagccaggaaatttgccagaggggctcttatgagacctttttcaccgagaccggaaatggcaaatacgtccctcgttcgatctttgtcgaccttgacccttcggtatgtaaagaataccaaaggcttgaattaaattggggataactaacatattggcggtgatatagactatcgacgagatacgcactggaacctaccgccatctgttccacccagagcaattgatcagcggaaaagaggatgcggccaacaactgcatgacaccctaatatcggaaatccctgtggtcaggactaatatgtgatagacgctcgtggccactatgctgtcggcaaggcgctgttggaggatgttattgaccgaattcgccttgtggccggtgtgcagatctaatacccccttgattcctgacctcttcagctcatcttataacagataattgctcttcccttcagggattcttgatcttccgctccatcggcggtgggactggctctggcttcggtgctttgttactggagcgtctttctgctgagtatggtaagaagtccaagctagagttcgcagtctatccgtctcctagcgtggcgactgccgtggtagagccctacaatgctgtgctgtccacacacggtaccatcgataactctgaatgtactttccttgtcgacaacgaagctgtttacgatatctgtaagcgcaacctagacatccctcgccctggatatgatcacctcaaccgtctcatcgcccaggtcgttagctctgtcacctccagtttgcgttttagtggtgccctcaacgtcgacttgaacgagtttcagacaaacctcgtgccgtttccacgtattcactatcctcttatttcatatgctcctgtcatatctagtaactgcagtggccacgaaagcttcaaagtcaaggacctcaccttccagtgtatgtactctcgtgtctttctttttgaaaccgtcaatttatacttaccgtttgacaggctttgagcccaaaaaccaaatggttgtctgcgatcctcacaatggcaagtatatggctgtcgcccttctctaccgaggtgatgttgtgccccacgactgcaatcaagctgttgcttctgtcaaagccaaggcatctttcaacctagtcgagtggtgtccaaccgggtttaagcttggtattaactaccagaagcctataagtgtgccccatagcgagcttgcatctgttgaccgctcagtcaccatgctctccaactccacctcgattgccgaggcttggagtcgcctcaatcacaagtttgaccttatgtattccaaacgtgccttcgtccactggtatatgggtgagggcatggaggagggagagttctccgaggctcgtgagaatctagcggctctagagaaggattacgaggaggtcgctaatgacactatcctctctgatcgggaagtggatctagagtactgatagtgcctatcttcctattgagcggtattattaggacctgccgtgaaatagttatttgttcgtctagtaggtcgaattcagaatggaattccttatcagtctccggattcccaaatctaactagacaatttgctaggactgcaaatttaaaaaccaatgccgactttgccgatgtgctggccgctggcaagttattttaatgagtcaaagacctcatcaagactgaattgccaccaccgtagaacggttgtgtgtagcaaatgaacttagtcgcatcctccatttgctcctttgagccgcgtgataccacgcacgacagctcccttggccaaagcaagatcagcaacaccaggacctcctcttgctttgcagcaaaagtgaattcgatgattaaaaccaaaccacaccacggaaagcaatagcatcaagggactgtttgatagttcccgagccaccctccaggataaagttgacgccctgtccatcgatgatcttttgagcctcagttgcccaggcggggttgtcttgtagttgataatgtagtaagcatcgtactgggctttaaggtactgaaccttctcgtcggaagaagatgttataatagtcctagcacccgcagcctcaatattttgggtggtcaagtgataaagacctgtcatccaaggaaaactttctttgcacaagctttacgacctgtttcaagaatcctgtcccatctatctcaaaacaccgcctatccagagtgccataaaatcgtcaatgtccatttgatttgccggtatggaagccagccgttgctattcaaagccccgagacgcactacaatataagcccgtccacactaatggctctgtcgacccaaaagtccatttctgcggcagcggaattctgctttgctttattttccatataattcggtgctcttcatcaataagcaatgcgatcatagcattggtttttcctttatccaatctcttttgttttggtacttctgctttttgccattatttgcttgattcgatgaaacagctctttttttctttcttctttctgttcgaccatatcggaattattctgcacatatgggggacgtccatatcggtcttgctcttagagaatactggtagtgggaaagtacataataataatattattattattttagccttcagtcattctgagaatcacgctggctgaggtggtctgtgccacttacttgatcacctggcctagggaaaggagagaacgagtgctcattgttagggtgtttggttcgttggctttatgcagcgtctcactctacaatgcccacagaagtgctatactatgtcgggggaatgcctgatacacctatgctccatgattgcatccatattttacgcttcgattttggtttatccgctgtcgctgtcgctggggataaaccccgaattcgtcgaagctccatccggcttccaggcctttggatgctgcccgcgcaatatgttccttgtacttgagtttcgtgtccatgaggattcccaagatattgacatggtccttgggctcaacggtttgtctcttgatagtgaaacacccctgctccggtttgtaagccttgggagcaaggtgtatgatggctgttttgtctgcttcaaaagtcgctccgctccttttctcccagtcgagagcttcattgagagttgcttcaacgccttctcggttgctctgggtgtcggccacgccaggctgcgtatatctgctcttgcaagagcacaagcgcctgctccgcagaccgttgctttcaggctccgaaatggctggtcgggagcaagccgtgtgtctccacaacgtgcgagatcctttctgctaccacggatccaagtatcttgcccagcgtcgcgaggagcgaaattggcctccatgcaaaggtgtagtttctcttgttcggctttttgagcggtatgatcttcgcgtgtctccactgtgtcagcaacatgccttcttccagtgacgcctgaaacaagtcgagaatcctgtgcttgaccgtgggccaggccctatacaaaagtgcgaatttcttctaatctatattctacattctatatggaaggatctatactgactgattcatgcctgatatatctggtataatccgtgtattcatgcatgggtttcaacctatcaaaaggaacgccgaatataaacttcttgcttcctgctacctctgttccttgtcgaaatggttgtcattaacttgtgtaccgaaagaaatgaacatgacgatgggtaagagtctggaaccaagcgaagtaccactcatctggcttccaataggggttgaaacaggtcgtatactaatgggtctcgctctttgcgatggtcccagccactggcgactatcgtcataggcaagccactaggcagcgagatcgcgaccctaatagagaatacccttctggataagtcaagggcttcgttggcggcgaatatcgtacttgcatataatacaagctggacatcggcttttccggagatgttttgaatgacgcgttcgtgttagccatattccatgatcatacgaagggtacccacccgcatgcaacgaccagcttcagggcaccaatacgtgagcccctgcgtatattatgactaacacaaaggtcctgcagcaaagtaggaagtgagccattgcgaggaataagcgtttctccacaaagtgccacacgagtgatatttaccgtacgcctagtgccacattagagcctttcaacttaaatagagtgacaattacagtggcttcccttgcggagaataagcttgccatgagattgagaagtcgtagctcacgtctgcccagtgctcagatgaaagaggctttacgttgataatcttttttattgaggaagccggcgatactgccggtcggccagactgaaagcctccaagcaatgacgaaccctcctaagaatgacacattgagtggatgacttgttcatagtctaggaaggttagccatggtgattaatttctcgctgaaggtgtcttgtttgtccaacaagccttctttagtggttgaatatcaagcgaggccttaccatgacagcggttttttgacacatctcgcaatgggaacgactcgttattggggatagaagagaagtttaagtcaaggttatggccttgggtcgctgactcggaatttggccactgtgctggcacagattgtgcattcaagcttctggtagctaaagagatctggccataggagtgctctgatggtggatgttctgggggggtttgagctaaggctcctggggatgcgagcttcgttggtgcttagcattagtgcttttgcgacataaaccactgatccaaaaccagtaagatgtttccttgcggttcagacctttggtcgacctaccttatttcgcacataggctcctcgcatatgaaagatcgatcactagtgtggattctccgatgacgggcccgacttgatgactgcatggagcccttagtatttgggcaaaacttattcaggatcattccctcacgtctgcaaatgctttctgacagcccgtgtagccacagacgtgcggcttttcacctgtatgagtgcgtatatgtacggtcaaagcactacgttgtatgaacttcttattgcaattttttttcggtacaatgataggggcgttcgttagagtgtattctagtatggcgcgagagatcgcacctgcgatcgaaactctgttagagttggcaggttaatttgggaaaatctgagtggacgttgcccttcgaatagctcgatcgaaagaactgaccttgtcgcagtgaccccaagaacacttgaatttgcgcttgctggcaggagccgtaggaggaatcgttgactgatacgccatagtcctttttttggaagcggatatgacggccatcgatcagagtgaatagtaaagggatagccggcattcaagctcggagcataacatggaaagcaggaaaaaaccagctgagaaaatgggagagataggagaagaagggagattggatctactgctatcattaaatgctagccttgaatggaagtaggcaagatgaatgaactttccaccgacgctttcaatgtccggtctattcccaggccgggaggacaatggtggataccaatagactcggtgcggcgtttgtcagtctataaatccctctccagcacgatatcccaaccaacatcctatgaccaaactgaccaaaaatggactatcccacgttgccttccctaattagccggccacccaggagacagcgtcgggtatcgcaggatgcagaagatcagtccaaattaggaacccatctacagcaatcttcaaacggcacaaacatcgaagccaaggtcggtcatatcctcttcgcaggaaacgaacaaaaacactaatactgcgcagagtccagtgacaccccgtgcccttacggtggagtttatgaaacttttacactacaatgacacactcgttataccagccctcaagctgcttgacttgtactcttccctatgggaatgctacgtaatcaaatctgccgagaaaatgcaatttgaggataagcagcgacagcttcttgaatcaaatgagtggctagcaagcgacagcgacatccttctgcagctctgcgatgaacaggcaatggagttgcgtgatcgaaagcttgcgcttcaggccctttgtaacggtgggttcagccttgcaagcgagcgatccccaagcctaccatgttgatgagccttgatgaggtctcagagttgttgagcgcccatgggcgacaataacatttggatagctctgacatctatttgcgttctctccgaagtatgatcgctgattttagaggaggcccatgcaaccgccggtgagtttccgttgggtttggtgacggggtgtcaacgtttcacgattgttgatacatccgacgcttgagtttcgagaagttagcatcaggccaccaagtccccctaatctgccctgaccttccgttatcgaagatagataaagtcctgctcaggttgcggcattctgtccctctcagccccgttaaatcgctgctttacacacttccatattttccctacagcgttcgacggccagtcatataccagaaatgaacggattggacgagaatggtctgtacccgtttctttgatgggagtttgcgctaatgttaatagaccacgatttggatctcgaccttcacgctatctggtatgaatcttctggcataccgacaccgcctccctgtctagttatgccggtacgagaaatgtatatattggaagcatgttcgtgggaggtaaggttggtgacgacatcgcaaaatacttgggacttagagatgctgttggcaaactggtaaaggaaatcggcgaccccggttacccatttccggatccactacaccactggtgttgtgtataattgtcatcgactacgtgtatgagctagtaggaaagccaacctttggcttgcccccgtttgttaccatcaactacgagcagaaacacggcatttcaggaagttggaccatgcaccgaattggagtaacatctaaaagtgatgaccagatccacgaggctggtgagaccttttgtctattattttaacctctaatccaatattgttttctagcgcaaaaatgatttaacattaagtctaatgtatctctatagcgcaagaaaccatatcgaagatgccgcaagcgtaccacgtacttgacaataattgccagcactttgtggtaaacctcgccgatgcgatcttgcgagatcctcgccacaaatacttgtccgttaaaggccaattcatttctgcacatgaaattggagttcagcctgagaggagcgagccaacacaagatgaacaaaacttcaagggcaagcaagactttcaggaagacggagacatcgaggaaggaaaccccgtcccaatcaccgatcgagatgccgagggtgctgttattgagaacgagaaggaacgcagaaagatgatgttgaagtccatagctgacttcatggctgataacactccacttattcaggaacgcgaggtaatttatcagtagcgtgccggggttagacactagatctttttgggctttgctcaatactaatataatgtagtaatacattcgttctacttatgaaaaagacttgtatatcactacctaggtaatagagtaactatatatgaatggtattgggagcttgtattgagaaccttgaaagaacaaaagcggatttttagtgttgctgatcgcggcgagtccatacatgtcatgtctggccctgtcgcaatgtcggaagagacgtgatgcggcggaatgacttgacagatcgtccgccactgctatttggagaagttttctcacgagctcggaaagatagattcaaaatcacctgtcattgtgacgttagcgataaagatacattgcggaatatccaccaggtcattcatcatattggtgaaactggtgcggatagagtagaccatagccttgatgcagtatatgagctatgattttagattagtaatcggcggcccatataaattgttagcaaagtcgatacagcaatacagagagttgaacaccattgattggaccctacattttacaatacggcccacgccgacagatattcctgtatcagtattaatacagtgacatactcttaagttaatacgttgctctgtcttgtaattgaattggcgacccaagaaactagaacttcccataggactgcaaacaactcaagccccagatctgggagggcctcgggaatttggtactgtacctctgatacagatgggcgctgcagaagtggagaccggtcttagggggttgaattaaagcttatgtttacatggatatttgcatgtactattcctattcgggccgccaccttggcatggctgcattacagccagtagataggcaagatacaagtcaatgaatactagtactggtaccgatggaaaataaaggggaagatgccacggtagcttgaaagatgctctgaggcttgagttcataacctgtcgacaaaacgataaaacgactgaattgaatgatgctcaagatgatcaagaggatcgtctcttcaccccttcggtaaggagggataggacaattctcaccattgcaatcggtaggcgagatcacgtggcgcgagtcgatgacatcccaagcatttgtgtgaccctcaggtgcggtaaattccccactccatcggttggctcttgacgttgccattgcagttcatattccccttggctccaatctttccatcccgggcaaaccgggcaatggaatcattaatgatatcaatcacatcctgtcctccaactgtaaactgcacattcccatcggtcttcgtggcctcaatgccaaacgcacaagtgccgtcggacaggatctcacggtgtgggtgcccgactacctcgtgatcgaagtcggtcgaaccgtcgccctcaatattccggatgatcgtctggcagtcagtcaccaagggcgaagcacccgtcgtttggtcgatgaatgacgagtcctcgcaggtactcttccccggggggatatcgcacgggtagttgtcgctacttcccttgtccgtcgtgtcccacgattggtacgcgcggtcagcgctacacacgggaattcgcatgaacccaggcgtcgtcacgtcaacatcgatcatgttcgatgcggtcattcggtcttccgggtccgccactggcgcgctgtttttcttgccgttgtcgacccaggtgcgtacggaacctttcacgagctgttccttcgtgaggccgccgaattgaccgtccttgagagtctccagccccgggggaactgagaacttgttgtcttgacagacagtttggcagggaccatggtcgccgacgatcttgcattcgcacttctcggcactgtccttgggatacacaatgtagtactgattgtcatcgacgcagacgcccgtggccgccgcgatatcgtcctcgaggtagtcgccatgctggttgccctcgccgcatgcgtggcctgcgttgatgatgaaagtgtaggcatcggattcgcgccagagggccgggattgaccaaccgaagatgcactgttcaatgttggtggtgagagtgctcgtctcgttgtatttctgttcgtccggctcgccttcctcgtatttgccctcgatgagctttccattgcgcatagtctcccacatgacgtcgagcgactcgggcgacccgtcgaagagcttctttaccgacatggttgccgttgcatcccaccccctgatcacctgcgccatgtaggcagagaaatgatcttgatcctctgctgtccaatatgcgtcgtcctccgggagcacatccttggcaattgtcgtcccctgccccaccagcgtcatgacagtatccttggtatcctccaggctaattcctttctcccagaaggccgcctgcttcttcagcatcgtgttgaagaacggcccggcagtaacgagcgtccccagcgtcagcaaatcaatcagcaggaacttccacgaatcatcctctggcggcggaaccggggcaaaggaattctccatatcatccaactggaagctgaccagtgtcgcggcattgtaaagctcatcccggaacttcttgaacatctgctgcatcttcaccagcgagttccagatgagctcggccgcggggccggactcgggcgcgttaaatccattctcgcagccgacgatcgggcactctccgaggatatcctcacactcaatctcgctccccgtgcggagcgtcgtcgataccgagtcaatgaagctgaccttgtttcgcttggagtcagtgtagatccagatcgcctcgacatcctcccatgccgcaagcgcgttcagcgtcttccaccgttcagacggggtgtagtcccacttgtctttactaacgacgtgcgtgcaatccatgtccgtccagttcccatgccgcgtatagttcgtcttcgggtcgttgccgttcaccaccatgcgcttgtacggcttccagtcatccaaggggcccggaggatcattgaatttctgcaaatcactggcccagtccgtggttcctcccaggccccaggcaatgtagagcttggtacgggtctccttggtcgcagcgctcatgtacccaacccactcgatatcatcatagaccaggacgtcgctgttgctgctcgcgtccacgtattgtcgattcacgcgactcgggtcgctcaggatttcttcaatctcggcttcggccaggtacccgcctgtcgcggtgcaccgccccttcttcgcatacgatgtcagccggtctcctgtgaactggcactcggggccccagcagtccgctgaggccatctggaacgcacgtccgtagctcgtcacgccaaccacgaccttatccccgggaacgccagctttggtgatcatggccagcgattggcgcgtctcggtgaggttgacctggctgcgcagacagttacccaactcacagccctcctgcgcgttggggttatgtgcgtcccactgcccgtggagatcatacgtcatgtagacgatataatcgaccacacgggagatctcgcgaatggggaactgtttcagataccagaacgaggcgggcgccgcaatcgccaccgatctgcccggcagcaggttcttgagaatcaccaggaacgccagatagttcggcccgtcctcctcgcttcccgggtcgaagctaggcagatccggcgcgccagggtattcccagtcaatgtcgacgccatcgaggtcgttgtctttaatgaagttggcgatctttgtggccatgttcagccggttcgcgggtttcaccccgttacggaagatctggtacgtctccgggaaggtggaaaaatcccagccgccaaaggacaggatgcgtttcactttggggaggcgtcggaattcgttaaactggtaagcggaaagctcatcgcccacggtaacatcatagttctcgtccagcaccccgaagccaaaatgtaggtgggtgtacttgtccgtgtcgatctgcgaggcatcctgatacagacattcacgcttgaagcagtacccctggtagtaggccagcttgatcgcgccagtaccgtctccctttacaatatccatgccacagttagagatacagccgtacgtgtccggctccgcggtgccgggggcaccggtgttggtatccacacagaaatccggggtaatgccgcactgaccccagatattgcagcaggcgttcagtgggcacgggttcatatcagcaagatctgttccgtcagtgggcggctcagatccaggcttctgcgggccacagacggcgttggcaatcgggtcagggaacggtggtgaacccttgctcaggcacatgatggtgtccttaaacagggggtcacaccccgaccagccccaggtgttctggttgtattcatccagctcgtccatggtcagggcgtactcggcgctgatggtgctgcagtcttcgtctttctggaccttatgcgccttgcacgaaccatcttcgttgggtatgggacggaaatcggggaggtcgccggaagaacagcagacgtgctgcttgacccttagcgacgtgcagaagtctgagccagggttatacttctgcaagtcagagacggatatgccgcacttggcagcgaggtccccgcatagattacctgcctcgacctggacagtgctgcactcgtctgctctgtggatcagatacctggccgcgaggctgggggagccgacgctgtggtttgcgctgctcgagctgagaagcggcgtgctgaactgcgccgtgccagcaaacgtggtggagccggcatacgagagacacgtcgcgttggtccaagaccgcatggccgtctggatcgctgagaaggtgccattactggtcaccatgactccgaaaatgtgcgaggcgtcatactctggctgacagagctgcatcgccaaagttggcgatgacacgttgaaattggcaagattatcttcaaacaccttcagtgccgactcggtcagcccctggttcagcaaaccctgtccaatgtatatgcccagggtagccgaaccggactggccgtatatgataaatggattgtcgtcggcagccccgtgtccgcgatcaacatacttgcggatctgcttgacaatcgacttaatcccggaggtcgcaagcccatagccctcctcccaccaaccaacctcgaattccacgttgaccgactccgtctccgccgccgctatccgcatcgtctcacgggggatcatcgagaaatccggcccgaaggacgagcacgcctggatgcggtgggagacgcccgcctcgtcgaccgggtcgtggagagagaagtcatagaacatggtctggtcgcatcgtttgatctgtcggaaatcgccatacaccgaccagttcccagtattgggaccggcaacgctgcatcgctcgggacagagggagctgctgccacggtagccgggactggcgccggttttggcaccatgcaaagcatcaccggtggttgccagcgccagcaaactggcgacgcccagggccgcttcgaatagtgaccgagccaccaccattccgacaaggctggggtaaaaaaaaacgaaagaaaaagagaggaaaaagagaaaaagaagagaaacaaagagaaacaaagagagatcagtattgaacgaaagattaaaagaatgaacggttgaagaactaaaaacaaacaatgagtgacggagggtaaagggaatttttatcatctacgcccatacatactgaatgggcaacgcttttatacagcaatcattgtacatcccgactcggcccatctcgatcgctcgaatgctcgtcccggacacctcgtgtaagcctggactgtggccccggtaatccttctctttttacctttgctccgcctgattgttacatcgcctcattctcggacgacccaagcgagatgaaatccatatgaagactccttggcagacatgccgaagcacccggatgagccatgcctcggagcgcgcgaagaaactcccatcccacctgacgaaaagcaacatgggggccatccttggcgcaatattagccaagattccagcgacgtccagacagggcatgcgttgcatgttaagagatagaccgggacgactaggatattgactcgccaccaggttttgggggcgggtgaccaacaagccaccggcggatggatgttggtatctcatttaacctgcatgcgccaagacattgatatttgatggcttacgatggaacctatcacgaatctaagaggttggtatttccggggcaccgaatcttcgcggatcccaggtacgggtggagacgctagcctactgcccaagccaggcgggtcctcaccgggcgaaaacatgtggttgagaggtgagaaaataaatggcttagggtatactactcgtcacggctgctactactactagctgcgtccagtagcgcggccgacacgaagatgcaccgggacttgcgaagaaaacaagtgaattggaaaacactatctgaaggccaacgaaagaacggcaaactccgtacaatggcagtaggttacaggaaagcaccggctcagaacggcgcgagcaggaagccaacggccccaaagactgccaggaaacacgacagtccaacaaccaccaggccctgtgccgcattctcattcacagggcagtcatcgggaggattcgcgctcttgcacaatctcgcttgccacgaggcctccatgctctcgaccacggcctcgctgacatcgatgcgacagggattaggcgagggcgtcggcgtgggcgtgggcgagaaatccaccaccgcacagtcgcggccgttggaccattcttcgcccgcggggacccggatggtgtggttagtgacggtgatggggacggcaaattcatcggggcaggagtctcgcgccgtgtccgtgacgatgtcggctggcgccccgtcttcctcgatcgtgaaccaggtcgaccaaccggtggagttggtgatcatctccgcgcgcgggaacatgctggtgttgaagagggcaaactcgttgcagctcttccagtggacgttccaggcgacccgccagcggccgggggtgcggaattcggagaagtaggcatagaagaaatacgggtctttgctggtgttgttggtccagtcgatctctgtcggccagtgcacgatatcgctcatgttgttcgcgttccggatcatgaacgagatgtccaggtcgacgagcggcgccagctcggggttctggaccccaaagactacggggaaccactcggtgggcgtataagtcttgttgcgggggaagaggaggtccgtctcgagcatgcctgatgcgtgcaccataatggcccccaggcaggtggcgagcatccagctgctcgcttgggaagaaggcatggtgtggggggagctactcgagaccgaaatgagggaatgcccacaatggtcactcggggtgcaaaaaagcagcaatttactttataccggcaggcccggacaaaccaggggcgggcctggggcttgcttgcatgattcaggggaaactcggttatatcctagcactaacgcgcagtgcagactagagtagcgctgcaacgtctcgtgcgttagtggtcttggctgctgcgtgagggcatcgagcggagtggccagcgagggctcggcatgttggtagcggcacttggcggctcggcggtccagggtgttgatccccccagactcgatcttggccgtggtgggctgtatgccggagtaagcgaagccgaggcaccaagacgcccagccaatgttgcttgggtcgtttttgagcctgtcgcttggcacccatctggtcagcgtttagcctccacgaggaccgaaaacaccacccatctccgactgcaacccgtccatccgtcgagccctccactggctcaactattctcgaaccagtagggaacgcagggcgccaccgcacgccaggatcatgggttgtctccgcgacgagccgagatgtcccccgatccaggcccaggtcgctctggagaggtatataaacgaggcagatatcggaagaatccctcctcgtatcacacatccttgtcaagaaactctcccccgtcccagtcaccatgcactttccccagcttcttgtcgccggactcgttccggccgtcgcctcggcccgggctctgtctcgacgcgccgtcgattgcagcttcaccacaagtccgtccagtggtgataagtgcgacagctttgcgagcagttggggtctcacggtcgacgacctgaaggccatgaaccctggcatcagctgcccgaacctcgacaccagcaagttttactgtgtgatcggtacggtcactggggagcccgagcccaccaccaccaccaccactaccaccgcgccgaccgtcactaatgagcccgccatgccgggcatcgtcgacgactgcgacgggttctacaaggtgtcgccaggcgacgaatgcgacaccattgctaccgaacacgggatcagcaaagcccaattcctggagtggaacacctcggtcaacgaccgtaagtctacttatttctcccgggtctcactccttctatgtcccttccccatgcaaagacagacccctcttagcaaaggcccaagtctaactaacgctctcccgttctccaacccacagaatgctccaacctctggctcgactactacgtgtgcgtgcacgttcccggcgccgccactggaccgcagccgcagatgcccgggatcatcagcagctgtcagaagttctacaaggtgaagtccggagacagctgctacacgatcctgcaagagtcggggacggatctgtccaatttccggaagtggaatactaagattgatgcctcgtgcagcaatctctgggtcgattactatgtctgtgttagtgtgtagtctgttgtcttcacggatgctgtccagtcggctcggtcgactacaactgtgcattatgttggtgggactggaaccccacatgccaatacatgccacgaccgtggccccgataggattagttcatatcaacactcagcaaacatcggctcagtttagcctctggccccgaccctctcgtatttacccaaattacatccgctgtagaacgggagggacatctggagggacacatgacggagtccatccataaataatgtagatactaattccatgaggcataccgtttcaagtctgatattatggaatctatgttcttcagtccgctataacggaagcaggagcatatacacaattagaggaacttggagacattcatgtatgtatgatgttcaacggaagattttataccagcctgttcggtgaatcatacccttccggacgacccttgggccgcacaggaagcatttcatcaacgacacgtcgtacttcttcaacatgcctgaaatagacgccgtacaacttaatggaagtaactggcaggacctaaatcgtctggtggcccaaggacggttagccttcatccacgacgacgacgactgatgatcgcgggaccgcaagtgtgcctggctggccgaacgatacgcgggatctgcccttgactgggtagtcaccgcgtattcggaccacccggaatacttcgtacattacgataccttcgttaccgaaacgcgcaacgccttcggaatcgccgataacaacaccatggccctcctgagacatgaactcgaccagctccgatggagcctcgatgtcccggtggtcttcgccgagtttgaccagcttacccagagccttggcatcacgagccacgacgttcgggttctgatggtggaacaaaaactggcccacttcatcagaaccctgttttcccagcaggtactatctttctccaattacgaaactataagagaaaggctcaactgcatgtgggccagagacccgaatagaagtgccgcctcacacgccaaagccaagaagccacgatgtggctattgtggaaagaaaggacacaacgtcggagaccgcagggcgaaaaactagtcacgcaccgctaggacgtgtggacgccagcgcgtgctcacgccaatacagcaacagcaaagccaggagcaagtgaactcctggctgacaaataaagtcatcgaaccaatcaaaacccccgcactcacgaacaacctcgccctggtgtctaaaaaggacgggcgtgtccgggtgtgcgtcgattgtacccccgccaatgaagtaacgaaagatttcgactggcacttgccgcgcctccaagacgtccgatatcgcacccagggtaaaagctggtttgcgcgcattgatttggaggacgcgtttttccgcatcggggtgccagccagatccaggcaacttacggcctttacggttggggggcaaacatacaaattccgacgcatgcccttgggcttgaaaactgccccggcagtctttcagcggttcatggatcacggactctcggagttcgccgatgcaatttggtacatagatgacattttaattacagccacctccggtcagaactcggctgaaggaaatgcgctgcacagtgaatgaacaaatcgatcaccgagcgccgatctctgcgaatcggaactttccgcgctctccgccccaatcacaaaagcagaaagaagcagcacagagcggcccaacgtggaccgaacgcaaggcaagcaacataacaaatcggggcctgagcaaaaggctcgagcgcacgaaaaccaaacataagagagtcctcttcccccttacttttccatagaatctcaaaaagcggttattatttcctgggagctctaaccacatttgtcgggatacgcgcgaggcatacacaatgggtggagatacgatatgcgggactcacatcgcatctgggatgtatacgcgactttccccctacaactgggcctcaaaatccgagaaaccggcaaataattcatatagcagtgtagcaatagagcctaggggacccacttcagggttgaacataccacatgtcgtatccagagcattcggtcttgaagctcatgaaccctacccctggctgttcagacatcggccccgagtttgatcgcctgaaggacgtcagggcgatatctctcaatgcaaaacgtgtggcttttgtcgaaaaggctcattcatcgcttcagtcacgaggacgtttcaagcagcgggattgctacaagaggtctctccttcattatgctgctatggggaactatacaaacccccttctatatcttctgcaaagcaagccggttgttgattctcgtgaccagtgggggcggacagcactctcctgggctgctgagtacggctcattggctgtagcgaatattctacttgagcaaggggcaaacctcaatgcctcggattatgagggtggcacaccgttggcatggctgatacacgccggcaaccctgaaatgataaacatagcggctactgaggcttacctaagagagaggggcgcgaaagaaatcaaattgagaggcatcaagtgggcctgggttagggttttgagttattctcgtttactccgatacattcgcccccgtatataaggcccccgatgaatgggaaagccgtttctatactatatcaatacgtatattagatggacgtcataactgaggcagccggaaagcactgtggcgagaggttgggccatctgatttcacactcatgttttctttcgtgtaaatttgctctcgttgaagtagagacaaaaagcaagcaagtttatttgagcataatagatatgccgatatgtatttcattagtaaaaaccctagtcttacctggcgatacagagctgtaggctaagggtacacgtactcgtttccactttagcccgtagcgaggctggtacattcgaccccgaactgtctactagaaggccttgacttcatgattctcgtactggccatattatctaccgcttcaagtaaaactaggtcttgggaacttcgttcagtatggaaaaggccctgagcgatgtttgggagcaggagaagacgacatattgattgtctattctgttgagactgtaaaagcaagccggcttgttagtaaaataaatagaaacagtgatgcgactataatgtgtgtaattatatatatatatgatcacaaaatatgttgaacctacaaatccactcacattatactgtctactagtctcaccattaaattataataaaagcaatatatctaataaattatataacaagatacaccgttattaggttcgattacctactataccagtggttatggcggtaggtgacagtgacagacgtaaatcgataaatccacaagttgaagttgaaccccctattcaggaaacttacataatctgagggtggcatggaccgatggcaaggcctagacgttgaccacctttttcaccgcccgaccattcaccaccacgctcatcactacgttcatcaccacaaacacacacatcaactcacacatcaacacaaatcaccactcacatcaccacacacatccatacgggaggcaccctgtcggcagtatgggctattggaaataatgccatttgcaaagttcatcattggagccccgataccacctcagaaagcgaaaccatcaaattcgttcaaaaaatggcaccccaggtacagtacgtcccgaaactggtgcaaccgcctacatttcgattgttccacaaatcctagttgccaagacacgctagtctatatcaagagtttttccggagtatccttgtcagcggggtacgtattatttggtgcgaatagtaacttgacatacagcggaatgtattgtaatttaatacaagtgacaactcgatacccatcttgatactcatcgccccttgcacggagatcttgaacgattaactacagtaccgtgtggcaagttcgaaactaatcttgctatttgacgaatacaaccttttcttttttttttgagatttagtgcacaccttacttaatgtacctgatctgcttcttagtagtatttaaaagctgaatacacaaacccgaaatagtctagctgctatgtctctcagtggtattttatttgatggtacgtatgtaagtagctaaagttgaaaacggaattccgtacctacactcaacagcttttgttccatccgtgctttaaccgaaccaaaccaccttatttcttgttcgagcgctttgttgctagtcagtatttgtttcataatcgctttaaatagctcgcttactctgatccgtcacagtgacatctctattagcagcaaagaccacatcctcagaaagctgccaggacctagtagcataggtcgtgtaaggttcaatactaactatttttccagtgaaattctttctagtctcgccggggcaaagtaaagccaaagattcatcagtattattttcatcatagagtgtcaatttcacatcggtctcatttgacactgtgatattgtcgttgataaactttgctgtaggcatggtaggagtcaatatccgtgtttggtacaacgtcgtaatggctcgatgaggaatccgatagtgaagcagtgtcttatggaaattcatggtgctgctaaaaatcgttgcgggcattatgggtgggactccatatatattgaggtggattctaaaacgtcataatgatcatcagctgctgcatacagtattgaaacactagatacatgatgtatcactgagcgtaaagtaccgtattgataatctaacaggaatattgatactccgggcttattccaattacggtatagtatatcttggcattagggaataagagacaatcgaagagtgtaatggttgcaccggtttcgggacgtactatacctatacctgaagtcatcacttcttgggtcgatggggagcgatcttgaacacatcaactcacatcaccacacacatcaccacacatcaccacacatcaactcacctcaccactcatatcaccacacacaccacacacatcaccactcacatcaacactcacatcaacactcacatcgccactaacggttcaacgcaacaagcattccaagacaacactctcatctctgtttgcctacatctgaatggaagatgccaatttctttgtagcgaggaagctattggattgcaagactatcaagggaacggaatgggaaatacatcctttgatgatgaagacgccttcagtttttacattatgattttggctattgaattggcaaagatctaactaggactccttctatgtatccaatgatgacccttcgggacaatgaacagatgatgaagatgttgcgcaggtctttgcttctccgaatactcttggaacactcgaatactggtccctagcaccacgaagaggtgcctgcacgggctagaggcgcttgttgtcgcagatgtccctgcgaggcgctttgttgacgcagggcctaggctgcagagaacttggtaatgcagcggtctcctgcagagaacttggtaatgcagcggtctcctgcagagaacttgttaacgcagcggtctcctgcgaggattgttgttgacgcagacctatcctgcgaagcaccctcttacatcgctgggctcgtggcagcgatagccgtagccacggagacgctcaagcccgcaggcaagagagggacattgtgacacagcggaacatcggaatgtgaggactgaagtcctgattttttttggactgggaatccagctccttttatatttctccggctatatctctataatggaaccacttgtgcagatggtagcgagaaccactctcgttgataagcgttgaagcgatttgaacgatgttgaaggggtgtttggagactttgtggcctacagagtcaagcctcgacctggaataattcctcttaaaattgtgcgttgagtgtggtgaaccactttcatcggatgttaagaagagagtaataccgtaaaagtatgatttgtacatatcattgaattttcaaagaaatcgcttaacgcgcttatatactacgtctcctagttttaaccactgttaccgtttctttcatgagggttgaagtgcttcgacagatgccgaaataatgggctggagatagccgacggaaacgctgtgctgtacctgcggttggccggaggaccttttggtctcactagaaccaatcctgtctatctttaggcttgcgccgctgaatgttatttctttcctttctacttatagctgacttaggttgtctttactaaaatctctactccctgggcgcgtaggccttggcatacttgcaatctcaggatgaagattgtctttctttggcatgatagccaaaaagggcccagacctttgaaaagctcagataagaaactgggtctagtttctaggataaccatgtgaactgatacaactaaggcccacgagctaggctcttgtgatcgccaccccctcgcaagattgtaacgctactatcacactgatgagaccctggagacaaatagcacccgacgggctaatcaaacaccacgcgagaatttagatagacacaggtagggttctgcgatacagatcttagcggagacccacgggatagtagatcagggaggttctatttgtggagagaaaatggaaacaattgcaaaggtccagacacgatctataagcctaaagttggccgctgttagtatccgatggaacgggagattgttgcctaggaggtactgctggggcaggtgagtatttggaatagcacgtagactttggcgatataatggtaagctataacccgatccgtggttgtgttcttggtcgcagttatgagaaggtaagttcccctatcaagtggcaagctgaactttgcctatctggtctgtaggacgttctagaagctacgtatcttctcctgcaataagcctttctccgatgattattgctctctttggactataacaacacttcctctccatctctttaaatctaccgctatttcaataactctagcagacggtaggctacaactcgatccgtggttgtgttcacttggtcgcagtgaagagaaagtaaattcccctgtcaagtggcaagcagaactttgcctatctggtctgtagaacgttctagaagctacgtatcttctcctgcaataagcctttctccgatgattattgctctctttggactataacaacacttcctctctatctcttcaaatctaccgctatttcaataactctagtagatggcttgtaaagaactataccaattatggacaaaaccacatgagcttaaataaaatgcctccgttttactaaaaccgattggccctggacaatatttcgatgtaggccggccctcctgcggccctaaaccttatttcaatcgatctgcacatcttgatcaagatgctgaatttaaagaaactttctaataaaatgttggccttaccgcagtaaatttatcctatataccgcccggcggagattatattgtttctattctagttctcattttttgggctgtaaggttcagtcacgaacagaccagaaagtgggcagaaacctaggcttaaattcttcattaaaaccgcattctctcactgagcgagcatttccatagtttatcacaacaaactctcgaaatgatttatagtcccgttcgtggttccgcagtctgtgtcaaacttgatttccttgtgacttacgcgtgggtcgaaagcagatcggacgcttcattccaaagatcactccgctcccaaccaccgatccaattaaatccaagcggacatgtttccttaggctaacaaaaacccatatatttttagtcttactaccctgtcctatctgcttataggaaaactcatagtactgtgaatccttatacactatccgcagtattttgcaggccatataggccatgcccctggtttagaatgacaaggacgaaactatgtagctgggcctgctcagaggcaccacgatcatactcgaatgttcaccttgactttggaactttcttactactgttataattccaaataagggtgattgctccttcctatataaaatccatggagtgatttatatctcttatactaatattcattgtcgagtaagcacagcctttatggtaataacatatacctggactattttatcgaaatagttagccactgttccttcgatatagcaatatagcgctccgtcgataatatactgctagtgtagacattctgttcgcctgtatctcagtttcctagcggtatagacacgatgtacatagtcctacatctaggacgacgatcgtgttctttgaggtgagtacggaagcggtgttagcgttacgcagcctatggtaaaaggtcagcctcttatataggaagaataaaagtatttcatacatattttcgagtgtgccgtttgagctggtttatcgctgtcgccagactggcaagggttagccgctagaattgtttgaaaccatttgttaatgttcctttgggtagaggtattgtctggcagagttaactgtgaaccgatattgactagcgagcgctgtatatcacctaggcgcttttgttttcctgaacgaccggggactttggcgctagtacgacgctgcttctgcagaatatagtactttttcccttataaagactcaacgcttcgatccacctaatattctttataatatatgtcagagagggctttccacgataggccccgatgggaatccagccaagagagaaggtttttctcttcctgttctagccagctgtatgtgctacgtagggacatagtgatgctcgggtaagttacaaaagtgggaagaacggttgaataaaacagtagaaagtgaattcgaagaggaagggttattgagtttaaaagattatagtattgtacataaatatagcgattgcgtttatgagccatggcctagcttagtgaatttataccagactcttatgactcgccctagcttaagtttctgaagtccagaagccttcaacttttgatatactatatttcgttaagaattaatcaataacgttaaacagccaccgtatacctattgataatatcatatggtttcactggttcgttgaaatatatcagactcttagtaagccatatagtaatcgaatagatatctatgtatagaatcagaatgcatgggtgaaaaatgtgtgcgcttataattcccgttatagtaagtaagcataacacttaattctagtcctgcgatataacttgctataaagccggagtgctttcttctatcacacttaaccagaagtaggaatacttatcacctcagtgtaactcagacgcagatataggcggaattcgaaaagcctcgcgccctcttcgatgaccagactttcggagcagattgcaacgtatattgtctttgttatccttagagtctaaggataccggcagtgtgtctagtaccgctatagaggatacaataagggacgagttaccttaggaagaatacgactctggcgaccaggaaaatagtgacatagctgataagagtgagtaagaagctatacgatagcagagaactgtatttggatataaaacggacttggaaatacgtaggcaaactcagctatctagagatagcaatacggttgctcttgaacgcctgatagagtaagtataatcctatatggatataattaagaattggcctgctaataatatctagactagataaccgaatagggtcagctgctgtcgatactaagtaagaatgtaaagtactaaccgtctctgtaggtctattaagcgcttattgtatgaccaagctacctagaatgaaactatttgtaacgatctagtcgatatcttaggccgattggcaatcgtcgagactgaggtatagaagttgaatagataaggtacaaataaatctatagagggccagaagaccgggcgatccctgcgtcagcagcagtgatgtgacccaaactgtgttttgatatctaactagatattccagagtaaggtataaatctgtgttagtcttaagttgtagatatgattattttactgactgaaaatattactgaatatagatactcttattatagatactaagttggagggttactggaaaaggtctgattaacctaatacgagctggtactagacgagctatatatagtttgtcgttgtatttaggtcttcgaattttattaatacttgcctaggttgtatatactaaagctatcttacccgagccgagtagctatagtcgtgacctactatatataaacgagtactttaagccttttattagttctactattgtagatgatttgtactatctagtctagtataattgtatacggtttatataactggaaatatgccctaaaggctaaagccacagtagtatataagaattatatgctatataaagatgattgtatattggttgcgactattaaggtgcaatccttcgcgattaatactagtagagtagtttaatatacctggtagttgagcaattgctatttgtgattgagttagattaggatatactacggcaagctttagattaaggaatgagaagagataataactatagtgcgtaagagaagcgggggtttctccattagacctatagtaataaggcctagcattgtcctaatcggactattaagatacattccctttacatagactataataaatatcaattccacagaccagtgtgccaaggtctttcccatttctaaagtgtatctaagcggtgtgatactaaatctattccgactgcgtctccacaagtatcagtcccacctacttattacatttcttaatgtataaaaaacaattaaggagtctggaattagtcggcctagagagtggtaaacctgccgttaacctgtgccgaatactgtattgagacgcctgtgcttactcgtactagtggttcttagaccaaggcgcccagcgatattcttcggagtaagaaattggtaatatatatacttcgtaatcactactcttagaatggtttggtaataatgttgcaggaagcctattcataagctatctgtgcgttaactctattaaaaaggcaattctatctataggaaattaagacccagtaagtctaacgcagatattcgttcaaatgagagatctgaattggttggtcgcagacggctcctactggctaggaagtgggacattcaattcagagaggctaaggagggtattgtggccctgagtaactgggccgctttgctcggcctagtccgcgtggatcactccggagcccggcaaataggatgccagttatctgttctggagggcatcgattgtattccaaaatcgagtggtcgtcgataccatgtccccgtgtgcctgatctagaaccagctgaatatcattctatggtacctaatcctatagagcggtattcgtagactctagctgctgctgtaactcacagatcttgtgcctaacccgctgactgttagctaatgccgcatctcttactgctatagccagctgcaatttcgaagtttcttcggttttctcggctttaggttgttctagcaattggcaatgtttatatctttcctcttctctctcctcctgtgctttttggatctcttccttaacgatacttatcatataaagatatttcctataggacactttattatgtttccgcctagggtttcgtgtttttgtgatagaggatgcctagtatagtcagttagaagtacgttaaggtagttactagggcaataggggcaatgttagccaaggaaaatccagaaaatattgtagaaggtagagattggtaccgtatgcttatgcaacccagtcgccggtttaagagggttccgattgtgtttcgatctagactgagtagaccgaaggggataataggaaggcacagcacgcagctgtactttactacagtggtctgcctattcccagaaagccttataattctttgccatactaagtgtactcgattgtaagatgaacaatagcgcaacgagatatagaatattaaaagtaatataagaagtgagtttcgagaagctgaattatatagtacgaggagacccaagtgtaggacttaaatccgaatgaaaccgctcttactcctgcctaggacgtatgccaaataagggttataatcctaagaaaactgagcactgggcattagtgcgaacgtacaaaatacctaccgctcaattatagagggtgcgagctataggtccgtataaatatatagttgttacatacaaccctgtcttataatagaaaggaccaatcggttacatcccatctaaagtgtagagctaagagtaaaatgtcatctttcaaatgttttgtgaagtttgccgactcctaggactatctattagttagccctagaaaatagcggcgttgtctttccgaattaacagttctaagtttcctgtccctatacgtctagattccttaataagccgttacttgagtcacaggggagaggcatttcttacggctaagacttagtagtaagggtatcaatctagtatccaccatagtatagatatgcttagagggataggaacctctagtgctacgaatcaagcggcagtcatagcaggtatataagcatgttataattatcagtttaagctacagtataggtctcggccttcactagttaagagttctgctatcaagtacctaactcgagactcctatagctcacttccctagtagcctacgtttatagtctatagatactatatatcacgaggccggtattagcttaaatctagataaagttggtaccaaattgtaaggtgtattattggaggtatatattcactgttgcctttaacgcataacaactagggtactcagtaggctattagcgcatatgggatctctgccgcgtactcccgttaatccaagatctcgctcgctaccttatagatgccattggctaacgattggatatcgcgtgtactaacttcgatctcaattccctccgtttataataagtttaatatccgccttactctagcgattcccgctttcgcctctgttaacttattatacagtttcttattatacgaccgaagaatttgtatatcgtggcggagttcattagcctcagcccagaccgtataacttttattaagacagtcatttaatcgggcataagtgcgttccaactcgatttctatgctactattagcagccttaagcttagaaatctctgctataaaagaaccatccattccgttactaaaactctccacctccaggctctatcagcaatgctgtatcaataaggatatctagtaatactcacctcccttagaatacagcttgtatttgactataagtgtcccaacgcatacggggaaatagcctcgattgaatggccgatcttattacaaattttccggtaaagataaatcttaccgctacttaagctagatttaagtatactagcatttgcgctcatgacggactaagcgtatctatcttcaggtcgcggttggagacagacttttttaggagcgactatgatgccaagtcggttatctaggagtattagctgagttattattagtagggggccacgggtatatatattggccgctagggcttcttaacattgctgattcagttttaagcgcttctcgttactacgcttaggtatcgtagggtaccttcagcactcaaagaatatcaagggaatagggacgcgggtatttagaatataattcggaactgacccttccgccaaaataccggcttaatataggatcgataattcgttctttctcaagtcgaaagtggtatccgtaagtggggcctaccagtatccattaacatagggtaaatgaagtttcagctaacttagattagttaagatttggttgaaagtcgggtataacttttattgagacctcattaagtaaactgggctactgaaaaaaacacaggaaaaagtaacctcaatttctattcaaatatatcctcaatcactaagttttggtcggcaaacgctggaattaatttggttagggcgtctttgcgctgccaaagatttctgccttctaaggtgccggcggaactgatagtaacttaatagagggtggaaagctgatacaactgagcagactgtcgggctcgctaacaacatccccaaagatccagcaaaacatatatataataggcagggttggggcgactctatgtcttttgtgccatctatctgttaaaattgcaatgactccaacagctcgccggccccgccgccaaagactagccagcgcccatgatctgacgccattactgtgcgacccctcaaagcttctgctatcaaagatgatcactcgccatgccggtcgtaacattcgcactgactcatcgagcccaccttcgcagcgagccaagaaggttcttgaaatgagggttcatcatcgatttcatggctcgcacgttacgttcctagaaggacagcctggcagaccccaaaggaaaggtgccaaagaaaccccacgccggaagggagcaaattcgcagcgagaggcaattcgattggattggatgcggcgacttcgtcccaagccccatagacgttgctagatcggacaaggatagggcagacatgaagcccagagggtggcatgccgcaaccactaatttcgtcatatcgttgaatagattaaattgactttcaagacactgaggatgacaatgcagtgcgtgatgaagtagcccgtagaaatggactctatgtaggggattgctcagctaggcatcctatcgattggtatacgcaaaaattgccagtatacaaaaggatattctctacgcttttatgatgcctgttgtatacaattgcaatacaagtgtctactgtagaatagtagaattcttggaattggggcgcatagaacgggccagaagaaatgtacggatttaatactgattggttgcacgatatgtgtgccattatccgtgccgttctcgaaattatatacagagttcaatgtatgtttctacgcaagggactctcagaatacatattcttcaaagcgtgtatcaccaaattgctctgagagagatcatgctattctacatgcactgaagtaaggggaacggagtttacgctgtagccagagttcatggggcgtcatcttttatttttctttaactaatttagacttgaaaacgatccgttgtgtgattgattcttgcggatattctatcttttagagacagcacaaatagcaacctgtcaacaaaagaaggtcgccattttactagtgcgcccgaagaacattcagcaccccctctgcctgatgataaggctctcaacgaccttactaagcccatcccctatttattctgcactttctatagtatacaagaatcacactctcaagtacccgattggctatgcccgtactagtccgtactgtaacgaccacgttccgacacaacctcctggtttcagtgatcttatctgagtcatccgtccagtggcatccacataccataagctagtagataagaaaggacccacctatttggctcacgggattgactgcaaggacaacgcccagatggcgataatgaccagttcgacctatttagtgtcagcattattagtataacggtataacgtgggaatccgcgattacctccaatgcaatcatccacaatctctccaacataccaatgacagcaatcacaagcaaaagaagtgctattgcagagagataacacgagatacaccgcaacttagctcgaccagcagttgactgttaaaataaacaccaataccatacaactacacaaaggtaatccgctaagagaatatagaggctacccagataagcagatttcaaaaggaaggttccaacgtgagagactactattttcgccaaagctaaagccacagagaaagaagggcatataaaacgcagtaatcgaggtatgagtgggttttcgcgctgctggaagattatgcgaatgtacttcagcattattagctcaaaacgaagacactgtatataaccgagttcggtgtactatcaacttaccgcttatagtggtgggaatattggtataatccaaaagagtacttgactctatactggaaacctattactccagaacaacctagtaaggatagcaaaggaactataagacaaggcatatagcgctaaatcgactttataccaccgccagcgtgattagatacaatataaaagaaatagtcttccaaagttgagaagtagaagaatagtcaccaagacggatctgatgatattttgtgaaaccacaactatacttaactgccagttaatatccttatttgaacgaggtcttgagatttatatactgtgacagagacatattggctaggtaatagtggataaattcctaggatatcttcatttggctctaggattttcttatactgagtttcctacctataaaaaagcagctgccctcaatcttataacactaaaggttaactgaggattctcagttaaggcttcggggcaacactcttactcttttactacgcagacctgagaaagactacatttaaagcttacagtatagtttctgatttaacttgcattatataagaccatatttacaagggccaatcacagttgcagtatcctgcttttatatagatatcgaggatatgcagaggtagtatatacatttataaatgcctaactcaatttctagagagtactgccattctctcaggactcagtcttcggacccgtagaaaaagtaaagtatgtgctcgctacaatatacctggaagtcacacaatattttaataaaacagctttacctttaaaataactggaattagctatagagtacacagtgtcttgaatgagtatatcctaggggcagtttttatataccgcggattctccgtatcagtttcagtagcctatggttgcctgccctagacggactcattagcttattgtgattactccttaggccgaaaccataactaacccttacttaagacctatgatttaataatgttttatcatcggcaaaatttaatatatatctcctttccaaagggtactaggatcagaaaatgcggagactagggttataatatccgttcaccgtcatgatagtatcttgctattcgtcggtactctatataacggggacaaatggatagctatatcactaaactattaaagtaagcgaaatatactctatttatgggttttaatcgcttataattttcactggcggtctaaagtacatatatattgtattggccgataagtagttattctaatagcgtgaagttaccatattagcaataatatatagactatatttccattttctcacttatatcagaaggttccagataataggttatataaggtatcgttaattggttcctataatctatagtatacaatatgcaaataaacgtcgatagatgtgacagaaatacttctactatttcaggcaaagtcaatccacttagaatgtaggactttttaaatcggccacgtttctccttattcctcgaaaaaatatacgcagactttcctaactaagaaacgaaagttaataatataaagaagagataataataaaatcgaaaacagtatcgggatcaccgcgacgcagacatttcatatggtgaataagtcatacacttgaatgttaacggcttacctagacagtagaccgggaataaaccgaacgatagataatatgacatgacgtttcatgtatacgagcctttgtagtccactattactataattccatacactcgatatcaagatatataaggaattgctacctataataccgctttagaatactctacgaggctgtatatcaagattaagtatatactatagagactgggctgccagaactagaccattccaattttcttaagagggcgcaaagtgtacagagtataaccgcagaggttgagaaatactagtctgccgaatacagtggctaatagagagggagcgtggagcagctcggccaatatatgaatagacggtactaaggctaacaggaccactgaggtaaattaaagagacaatcgggcggaaaatgcccctatatccatatccttgagatagccgtccgagaggcttccaaccgcgattattataaaagccgatacacacctaagttatagcaatggttaggctaggaagagaaaagcgatcgtaggaagagcggcggtccagaccaggaataaaccaccaaactatacagaatcttgctctttcctcattttctccttttagaatacactaaagcaattctgaaagataatatacagatactatatagcacttcctctactaaacgccatcactgttagagcgtataggattgactgttaagataaggggaaatggaagatcaagaacataagtagataaatgataaagtatgagaatctaagcgtgcctataataatacctatggcgcagttacacaggtttcggtaatcgagcgtatccattatatagagttggggtaagtaccggccctcttaaggcagtatccctcaggcgagcatttggctttatagataagagtagagctcagtctttacttgttaaccgtgggttaggtattacaaaaatatatatattagaataatgataggtacaatgttaatcaccagaacagtaaggaactattatatctgtaataaccacccaccttaacggccggcgcctcagaagtgaccatatttatattatattactagaaactctttttttgcctcattaatattcaatctaaccaaccgactgacagtcctccctaactatataattggtctctcttattatacaaatgtaagacctaagagttcgtgattctacctctcttccataatagcactatggaagatattatatagattgtacgctagatcggttaacaacaagcacataatatatattatcgcgattgctattccctctttaagctactctaagagcttacagaatatacgtttaccgaactacaaagactttacaaatccggcactgagcgctcaaccaattctatctatcaacttctccgaaattatcagaatataatctataatctagttgaaagagtatgcgaagcctaagcggaatacaaggagttctgctcagtgaatgaatcacactcagcacgcgttgtcttcgagcctatcaggagaatgtacaccgacccacaagcctcattgcagggtctaagataatggtagaactactatcctagtatcgtcgcctagggagatggacgagcacaactggttactctactatagagatattttctaaggcagaatttctgtaattctgtatagccgcgtgaaaatcataatgtactttatataccacagtatttctctctaaaagctcatataccatataggagcccaccaatacaaagatacagctatcaagaagttccgattaccacagaatatatactataaaggcgagcaatgtttagccccactatctgctaccgtccttatatatcattccttatacactcccagccgaatgacaatctacgggcttggcaattagatacaacagtagaaaagatggaccaaccatatggtggaactactaatagaaaagaacactgctaactatactgtggtaatcatcttagctctaaggataactttaacgccgtaaggctgcagcgtgttcttaaccttagaagcaaaaatcccatatatcaccgtgaccgcaattgtggcagtcgtaatcagtatcgaggaaagcttaatttatcagtatgtctcttcaatatttgtccaagtatcacataccgtataaaatatggcaagtgatctgctgccttttgaaaagaaaactttgcgataagccaaaactccggataatatggttaccacaaacccagtaatatacaaatagaccacactctgggaaaaccgtcagtagccggaaaccaagcttaggtcaatatctagaagtatgttactgagatttatagatatggaatcaagcacggcggatatattaaaagtaaaagagatgctagggtcggaataaactatctccgagccatccttagctttacagtagctctagaggccaactaaatagtattgaggcagatatgacttaaattcgtgtacctgggcttcgaccatactgctggcagctgacgttgccttatagattgcttcatttgcgctagtatagatgctagataccacacctttaacggtatttcttcccccgctctcgatatgcgcagtattaatattagataggtcccgaatttgtaaatcacgtagctttagaaattcttttaggtctacctaccgattgcttagcattgattagcatagaagtttttcgggcgtatcttacttttagaaaatgtagacccttcggcgaggaagataacgaacatccgataaagataagagatagatagactagaacggcgacggtaaataacaatgctgtagttaaaactagcgaatccaatctgctcttggtggaaagctttatagctttagaaaggagaagataaaggagtgtctcttaaccgaataatagactttgagatcgagagaacaattgagaactatactatatcgcaaattagggaagcatttatataaaatttctagatatagtcaacttaaccagtgtaggcagtattctataaatttaattgagaccggcgcaattttctgcctcattctataggcagtagtagataaatgtactgtataaactaccagagtatcgggatctataatatatagtattataagggcaggcaggtaattaacagtattaatcgccggaatataagggtatgcaattataagtgatcaggctggcaagttagatctttagcctacaattattcttagatagatttaataattaaggtggtataaatactactgtacagagtgaccctcgatatctaagttgtctttctcgttattctatacaccttctcgcctataaatcgcagctgacttatactagcccccgttatatcattttctaggcagtcagaagttgaatattaggaacagaaattatatgactatcgagaaagttattttaagctatctaccagagtgtatatctcttacctcatcttcgagagtaggttcagaagacagatggacggccggcagaatatctgtcgattgacacaattgataaagatataaggctgtcaacgcctaataagggacaactacgtgccggtaatagtccctagggcttattggtaagaccgcgtgtggccccgatctagcggtagaattattcctagcttggatatagagctggactataggttatgcgtatacgaccacgagaaccttataacagctgtaagggatttccttagccataacgatcagtagtagattgttgatatctatctaacggataataaggaaggtgcgttacttagttttagctctcagagatcgtcattaataagtttataatgtcgctagacgaccacagaaataaagcggagtctattcatcacaaattcatccaatcgctaaaggagcggtatctaaatgacaatcgcctacctgatagactgatctacaagtggattaaccggtacaaaggctaccttaatatacctagggatccgctcgctacaaataactggtaggctgtactggaggccctagcgggaagtaagaaaggaaagtattttaaagcaatttttcaaacataagaccttataccaaaagctaaattctttactcattattctgggtctctagggagggatacggattaggctactttataaactaacagctatacattgcaataaggtaaatttactctaaaccacaaagctagttctatctcagctaacttgattgtaaatctagccagtagtatgctactgggaattgatcttctccactttttcgagactggttggaggaagggaagagcttttattactaattgacggagttacggtcgagctgcttcaatctcacgtccctaaaatctcctataaagatttgcaatccttataagtcgagttggaggagggctggcttttcccgaacttctcggaagaggctcggcaggacatataggtgcgtttaaaagagatcgattatctaattccaaccttgaaaacattttttaaagatcagctctatcttaaggtagcttaaagtatcataaagagactgttcgtccagctgcgaagggaaaagattactattaaccagggtatatatgggaagtataatactccggttcccatttcgatgacactgagataggaatggctgggatccgacctactcgaattttagcacttcagcttctagtatagatttgaaataaccgatcactaacgccttaaatagccgatagacgctaatctcgaggatatgcttaatcgataaagctccggatcgtctttcccccctaaacaggaaatacggcgccatttctttacactggtaagagcgagaggtttctaagcacctgttacagacaacacgtcagttataataggggagctaccttcccctagagtatacgaatacctagaagacttagccgaagaaatagaagttgcgaaaagatatggaaagccatactcgaatactattgaggcagatcgattcgctttatccgcagagacgctgcggcaaagtcaagccttagttcgagtaatagcggggtttctccgacagtctatttttaaggcgttctttggctatctatagaatagtaatagttaaatagccggtagtgatcctcctaacgataacattgaagttcactatcgcagcgaaaggccgactaccgcaaatattggtcgggctataatagccacagacggtatagatatagatcctaggagccttaggccaaaccctctcgtcacctcagcagcgcggacgcataatgccgcagctactactttaccagctaatatactgccgccgttcggtatcatgactatcacagttggaggaactacacgagtattagaccaaccaatctacaacttatttataaaagacttttcgactggtctatttaacaataacttcaacgtctagaccgataagagagaaaaacgatccatttccctatatacgtactactctcattatctatacaatccgtcgtcggtgctatacgccgaatttagataaaataagcatactacctacgctattatactctcgcaaatcggtgcggggagcaagagaaggatacttaataaagacgagcagatggctagagtagaaatatagttacaggagcaaattgcgttactttcggatcggtgtaacggtaacaaagacctttaataggtaccaaactcgggttttactaaggccttaaagaggctcacggtatagaggaggcctggtatagtagggatagtataagtgaggcatataaaaattcatatgtggttaatctatcatatctcggagatattcatctaaatggtaacgttttaccttaaagcgagtaagcctatagtatctatcttatatagcgctttagggatagatagtaatgtactttttgatttagtgagataagttatagttcgatcaaatataattagacatatacttggtgtctagcactgatcgttatttatattttatagcctaaacagcctgacacattagatagtaagttctatagcccgaggaatctcaatagcttcaactattctctgatttatatactcttcttctatttaacacatagcgttatacttgtagttcactctctggccaccatcaaggattctataccatatggcgtcgcttcaagtttaataagtgaggtgctgcctcttttatctcaatagactatggtacactccgccgactcaaatacctttactaacccagaggcgcaataacaaggaccacccttacaatagtccgcctccctaaatatataattagacaatacaacttaaattctatatcaaagagtagcttacttgataaggcaggtatttaggtcgagtttcccagaaccctttagcgagggtattgtagtagggctatatatctcgctaggtacacttagggataccgagatactcgcaaagcttaatatatgcgggagctcgcagctagagcttatagtataggtagcagacctagtactctcggtactggtgcttatctattattaagtgctttcgcgtcttatagtctctttattcagtagtggcaattgatataaataattgccctactattacaagggaaccttattaccagctaacctttctatatattaccttaccgaagctatcaggggaagttgatcgtctagggagactgcaataccacgataatcgatagaaggactattaatacctataaaggttagcagttaggtataatacgagggtagtataatacctatattaactaagtacactttctatcttagcctcgcagttaggcgataaggaaactaattacatatatctagaagttgaaagcgtggcattcaagcttcctcctatagcttggtgctatatactgactgtattatatatgaatggaatgaggggcctaagatcaagggcttaaacctgactaaggatagcgataactgtaagcagagacctgaatataattaaataactttagtatctaaagacccggctttggcgggtagtgctgcgaagcgcttttatattattaaggctcgatgagtatatttctaaggtaccaatttacctaagaggcgtggtaatcctatgaaagtaaaagaaatagagaagaacgacgggtggtacattattatgttggcatcactggcattaaagaaatgccgataatattaaaaattaatgctagcgggagaattaactcttaattttaggacagtatatttgtgcccgtatggctcaatttaagattctctgtatatgaagctataactttagaaatatactatttctaagacctaagagatatatattaccctcgatcttcccctctttaatggactttgtctatttccaatcaatatgatgagggccggtatagattctgctagtattttgttactacttctcgccgttttagtcgtaagtggctgtatattcgctctgcattatgtaggtttcatatactgactttcgataggttgtaaggccctataataacccaatctatacagtaatatccacctatctagtacaatccctagaaagcgtatctgcgaccgtgacctactaatatattttctagtattattcttcgctaatattcccactgccaaaactattgtacgaaatgatcatagaggtcggtccctattattaattgtttacaagtatctaataatcgcaatagtaaactccggcttatatatattcgcacagaattgcttatatagacgctacgacagagaatattgaccacttaagtaaagttagcgaaacctcgtgtaacgttaatgctggaaattattatcgtctgttatatactaacctatctggtatattcctttacaactatgtaagtactctaaactttaaggcaaatagggctccgtactgacggtactaagagcctcgagtatatcttaataaactgtggaagccttatacccctagcgacaaaggtttaataaatatgctaggtagacaacttttatacgtttagaataatcggcggctcttctcaaaacgcgagtgactcaattgacttttacttggtagttataggcgaaactatggggtatcctatagagtagtttagaccttacgaccttaccactaagtcggattggtattcgggatggaccaattaaggtactactggagcgtagcacggatgtgattcacatttctgtatattgattcttttagaactcttaaaattagggagctgtttttcctatatgtgcgctcgaaataagttttaccaatttgttctctttgattgcttctccacctctatttttattaacgctaggcctaatatagctagtgaatatttattacccttttcctattcgatagtaattgataggctaggctagatataggctgaggtgatctgactaagacttaggaaagaaccaaagagaataaaatagtgaaggaatttcgagcggacctgtaaagcttgtacgttagtaattccctttctttaaagtatcgaacgctatcgctacctaagaagcttcttagaatgcttggaatagcattcgccgtattgtattgtaaaatcgttaaaaaccagtattagccttaacttagttattgtgcttatgcttactgtatgaccgatgagataatacttcgacagtacttccgcctaaaatagtcaaaagcataaaacaaataatatcacgcatatagggaaggaaatcggttaattactagagcggttaaccctggaatattcaccctatttccattaactggccccttactacatttctcgagataatgctaaaccaataaagatcgaattaaatatatccgccttagggatagcttatttttagtcatctcctgcttacacacaactgcctttaataaaccgtttcgagatgtcagttcttcgagctctgcttataagaatgacaagtgtgtacgaagacgcgaaatccgttttaaatttcggtaaatagcccgactcagtcgtttcaatttgggccagccttatctctttagagttttaattttggtcaggatttgacctatacctaatagatttactaatggtacccgagattgcttggtagggaatatagtcttataattatccctctttcgctaaagtgcctgtttagactgcaattgagctaacagatacaataatatggctataggatctaggctgggacggtaaatatttggtattattgctatcaatgttcctaccggccgctccacttcattctcaacggcagtgatacgatgagttagagaggtattcgaaaagagtaaaactaataggatcatataactaatatagtatttatcggagatttggtctcgcctatctggtaacacttttgtttctatagctttaccgggattttagctaatcaattgatacctagaagtcataacctagccggtacggatgctatatgtacccacttgcgctgtagatatgttgaagctaaagtctaatatgacgtacggtagctgtcctagacttactgcgtaggactagtaatattaaatagagatcaagtattctataataactagaacggcgctacgagttttatagtataccataatatgaccgcggttaccgttatcgatctttgaggctaggccatttgtatcgctctcagtatcaacgggataaggattatactggtaggaagcagaattagaggtaggagacagtgaagccttattatgagaatggccatatctgtaccaggtcgactctgaattagaaggcgtagcgtatatatttaaagcacgactgtactgatgttgattcactgtaatcatttttactaccttactaccttaccaccttcactaccttcactacctttactgtcgctgagtcctgaatgggaaccactcttaggtatagattagcttctatcttatatacactgaacctagaattttaatattaaaatgtatcccagagtctagttagagaaataggtggtcttgaaatggagtatcggcctgatctagcaagattaatcccagataaatattgtgaggtattttattaataagttgtcaacttaagtattatttgaaaaatgcgagaattcagctgtcctaggtatgaccttcgctcttttttccggggaatctaccacttattgcgagggaagagtggttgaacctacggtatgcctatagagataacggaggataaagcagtgtataataaagatcccgatcaaagtaacactgcctctaaaaacgctgctaaatataagtaatgtgccctgctttgaaagccttgccgatagattactactatagattgctgtattgtgccttttatgatctgaggtttttgtggctgatgttggtctataaatagaggaattagtttaagagctagccagcgtgcctgttaacgtcctcgataaggtttggcttttatcgctatgggccagagataagtaatgcccagccgtcccagtgatacgattagtagtgccagaccattcggtgccagaagctctgttgctttagaaaaccctgctttatctggtttctctgatctcggaagcttcggtatgtatttggctagtcgaataatacagggactctatgaaaggtcccgatgagtccttagagtgcggtgtttctaaactagcctatacttgagatgtacgattgaatgcaaatggtaaaaaggtggctcttatagtcacgttctaaagtaagtcggtagtgttattctttaaattctcaattagaaagagactatagttattagaatcggtgctggtatatgatcctcttatggtaccggttatagaatctttttcggtaattgctccattatgcttgggttccgttataggcttatcaacaggggcgctgattggagaactggagtgtaataataaatcacagtataatggtcgatataaggctaataaagggaattatttcgagactagtgtgacgtaaggccttgattcctccttatatagtgcctggcttatctaaaaactaatagcttgagtgtacgttagttttagtgaagctaacgtcggctgtaagtcaataactgtcagtgatggtattcaaaggtaatatattgtctctgaaggctaggaaagtataagaaaaatctggaaagaggcctatatgatatatacgactgctgagcgatagctatgactttctatagcaagcttctttacagactgaatatatattgattaaatacggaaagaccagagtgtattaataagataaggaggactgttcaatatattaggtctctgggaatcgccgatataattctaagtttctagggctaggattgtggtaatataaaaggtatatagactattataatagttagttatgtctagtactagccttagaaaatgtcaattctgcacgttaatacccagccgcatatttttattcgctagactgtaatataagtcgtagtagtaaatatcgtttaaagttcctgcaaatggtaaccatcgttgaagtaatagattggacaattaggtcatcgcagatatctgatataaataattgtatctaccggctaaggtaaactaccagtctattgcagtaaattagtggacaatagcgcctcctctaagccgtgttaagtaagagcaactccgtaagcgttgtaacaatctactacgataccacaatgaattttggcttctatataggatgaaaagctagcttattatggaactgcctgatagttagatctttacataccactcctatccagagacccctccgcccttaagggaagatatagtaagacaaaattaatataagtattcgatgatttgccgctaattgtgaaagaaaacacggcttaagcccactattattcgaacgcctcgcgactatatttctgcgacctctactcagtcagttggcagagacatcccggtcttctgtgccccagttcgtcaggaccaaaaatgggaagctctggcgaatcatttgaacaataatcgccgtatggtcttgtagtaatataaaccgttttatacttagttagttcactttggtgcacagtgggatccgtggcgtatatcaagaaataccgatctcaatacggtggttaaagcaatggaacctgttcaacatagaagccgggtatgacatcggggagaatcaaaaccaatgtcaccattttatttctttgattgtttcttaaactctaagtctagtcacgccaggcctaatgtagttagtcgacgatgtactgctcatcgccctttcctattcgacggcccgaattggtctaggccagaagtagattggaggcgacgacccaaagaggacagtaggaaggctagtccggagcggataagtaaatttcagttggttgtaatacttgtcttatttcctacggccatattgggagcggatcataattctagtaaacttgggaagtttcagtattgagaggctctattcggtatatgcaaagggctaacctatctataggctgtgattggtcggtggttatggcccccgattgattattaacctcaacttatgccctcctttttgagtctcccaaccaggtgatcgaacgaggaaaaaaagttcatcttctacgacacattggaaccatcaccccgtatacgttctctctccgacgctacctacgcctaacgagcatccagcgatgtgggtggagtcgaccgtgtttcgcacttagatcaagagaaactgcagcatgacataagtgctgtaaacggaacgcttcaaaaggggctataatacttactgattgggtcactagaaaggcgatggcttcgcctcacgctgtgagtgggtagcgagccaggtgtctgccttgcagagaattgtcagcgcaagtcttcgtgatatcgtaatatatgggcagtgtgtactaccgactctggtgggaacatgattgcctttaatggcctggaagcatttctggtatatgactggccgtcgagcgctgtagggaaaatatgaaagtgtgtaaagtagcgatttaacgtgggttgggagggatggaaagctggagacggagcagtttctattcctctcttattacacagaatgaggacaaaccaggagaatttataaccatatgctaagttatcgaatgggttgaatatatcaacagcgtgcaacgggacccgtcaccaacacaacaaaagtttaccagcagtataggccttatctctccttaaggaaaacgcaaatagatagcggaaaatcccaatgccattttccctgcctcgtaaacgctctaccacatggagtctctatcaaggctcagcctcatcgacagagtaggcttaaagatcgctcgcttccaaggctgaaacaacaccattataaagagcctgaaccgctcgcttacactcccacaatactgaagcttattcattacagagctatagaaggatatcgctatcgcttgctagcaagtcatttgacgtttaaagctgtctctactcctcctcgagtcatattttctaggccgatttaacgacgtagcattgccatagacaaaagtacaagtcaagcaatctaagaactggtatagcgagggagtcattgaggtttactactttcatagactccgccataagggtaccgcgtgttctcactaggatctattcagtattagtaggggttttcattccctaccgtaggggatatgaccgaccttaggttcgatagttgtgccgtttgtaacttactgtggttggttttctaacttgggtttatcttctagagcgtaagatactcggcactgtctcttagccggacaattaataggggaaggcgaagtaggatggtccattttagtcattaagataaattggatcagaaattatgcttaaggggcatttatagctgacaattcacgtaaggctactgttatttctaccagtacttccttacctagggtcgaccgcaattttaaagccaacgaatagttagcttaaccgctaacgctcaatcttactacctactaagagtaaactgcttaggaataagtaggattaaatcgtatctacagcattaatataaaccaatgcaaagactgtcttataatggtagtctgcaagtgtacttccgatatatggatgctataaattactttcaaattatcgaagctttactgtgactacaaaccattcgaagtacggaagtgcagataatttgattcccaatattaatgtcaacaggcgctaggaatagccatctcgtatcatatcactagagctacctaaagtagatatcgctagcccttataaacgatcaaatattctccttagggactgtttcaacaattttttagtagtattatcgttataagttatgctttgaatggccttctagatacaatagtccttcgctagatccagggatctccttaaactgaagtatattagtctaggattagccacaagtgcattaacaattgagagatattcccccctgaccgccaacattaatagatcctcgaaccattaattcctcaggttaatatcaattcggctatggcgtagtagttcccagaccatctctaggtcaccgccataggcagtaatgtagagagcagtatcataggttgcgaccgtgctttcattaacatttagacgtacgccctgctgtactaagagccttactatatcgagataaccatataaaaccgctcgataaatgggtagatctattaaaccccttctattaatctccacgccctctatactcagtaaataagcaattgtcttcacatatccgtgatatatagtaacggaaattggagagtggcctacaacgcagagattcagagtaatcctaggcactgtaagcagctatcgtaaaagtttagtatacaatctcgttacggtatagtgtaaagatatagacggggccttaagtctcccacagcttctaacgaaattaacgtcgatatctttctccgccaagagcctttccgttatcttatcgtataacgagtaagtagacagctaaagtggcgtattgccatctttgtctttacagtttacgttagtaagggggtagcccaggatcaaatcgaccacttctaggcgtctgctttaaacggcaagatagagcggcgtatagcctttccagtcctgaatgtctaagttcagacccttttgcctaagacgccacttaacagtatctatcgacctatataacactaccttatgaagaggtagctcggaatcctgagcatttcgggtacctaaataaacttcacagtcgggcccattaataaacattgttcttatggcgggtctattgattcaatatacctaagaccacgccgactggcccgaatcatcttctaagttagggtcgctgccacttaaaagtagcagttacacgaatcctattcttcctgcaaagactgctaggtaaagcgccgttcgcccatatttatatttaatatccacactggcggcgtggtattctagtacactcttaacgacagaggaactccggtagtggatagcatataacagggcgctatcgcgcacttgattttagatattaatatctaggtctcgacgattgagcagcagttcgcgcatagcagcggaagagtatttcaacgcctatatcaaaggagttttgccttagtaaaatgtattaatgttagcgttatactggagcaaagcatccataaggccaacgttattgtatttaacggccaagtgtaacagattactattctgaaatctaatattgtatttccaggtactaggctgtagtctaaaatcaaggtctttacatgatttggcgagggcgaataatgtactaccatctaaatgcgacacgatccacagcaaaagctcgttaggtaggtctctgatgtttggctgtaatttattagcttatccgtaactttagtaagaaagaattggaactgaccatagtagaacagcagattagaactaggaatcaaataatttgtatataagggtgagctgtagggtataaaagttagacgtggagagatccttatatacttacctcagctaattccgcggttacctagggtatagcccgttaccgctgagaggtacctagcaatcacacagcagcattaaattcttgataacaatgtttaggcgggtgaaagaatccttggactctagctcctgggaacactaaagctattcctagtagttatcgatggccctgggaaccggatatagtctctatatacctacacctcgaatctagtgctataggcgtcgaagcaaataataatctaacacacacttcgaaacttctataggtaacctagaatttaacctagcatttgtcgactttactgcgtcccgccgcagctaacctattcgctaatatatggtcaccgcaacctacagctacaagtgcagctaatttaggcagtagtgatatagaatgatattccttctcgcaggccactgatcggcctataccggcgtatactgcatccaaatgtattcttcgacgtactaactgtttcaaggaaggcgttatatgccagcagccatacagctatataggtaaggaggctacggcgatggcatataaagctgacgagggaacactgcggagattacctaacatcaactcctatctaaagtattttctaccttttaagacaatctcaatgactactataccttagaacccatttactgtctacggaatcccttacggtggtcctatgtcctgttgcagggtaacgaagaaaggccagctgtgcaaaagctctgtcaaattttaagacaccaagatcggccataaaaggttgaccactcttactagagagccgtttgacttatcaactttacagtcaaagctctgtaatattactagagtcttcctctgcgcgagatagtaccgtcaacggcagaccgaccaagttggctagcggtggtataaagcagctatccgcaaccaggcgcgagtgccgcatagctctagagttaccgctccatccattacgtatccgggccagcgttagatatcgtcagtctctaggagtcgccctgtatcaggcaataccgacaggtcaccttacgggctcagataagacctaccggtacggctgtcaaccaaccctaagccagtacaactattcaatccatttgtgacttccacaatactgcggacgaacagtgttctatggcatatttcgccggctcaaccagcgatcctaacatcggtcgctaacatctaggctggcgtccaagacttaacgctcaaggatctcaccctgagcgactatattgacgacatccactgtgtattttgtcttaccgaggatgaagatcttgcaaataagagggtgatcttgcgctgtcagtgcaaggcgctttcctacctagcctgcgcggaagagtggctagaaaaacgaagtacgggttttaaaacgttatgctgtatatggtaagtagggctggttccgttatgcaatacccaaaatgctgattaatacagtcgaaatgaagggcctttagacgccttggttcgcccaatacgagtccaatcgtcgcatgctgagacacatcatatccacacagcaactaaatcatctgctaagagagaacttaccactatcaggaatccatcaccaaataacctgagtcagagccagccgcgtcagcggtcagtgggaccctaagtgggatcagttgagcagagcgtggagaatggcccccgtcgctcggctaggctagtaggggcccatctaccaccaggcccttctacgtctgcaccgccccgccggtcagcacgactaaattccactcgaaggtgatcttagtttacagcgaaggtgtgacgggaatgagaaattagcgaagcgactgtcaatcacgcgcgaagacacgtgaccagacgcaccgcattcggcccagtaacatagagcatagccgtggtatggagttttagagcaagtttagaaatgatgcaaatgaagttctgaatgttcgaactcgcagagcaccaaaactaaaaccatgctaccttttcatctttgcaagtactagatgctaatacacccccaagaactgtgggcagtttcgcttaattttgggatattttttagatcgagaccatattcatacccaacggtggtggccaaagaactgtagacatggatttatctcagtggtgcgtgtcgcgttaagacggagattgttgacagaagaaaacacatctcgggccggcgaacgattctggcaaactcctatgctggttatattgactctgggatttaatatgttgaatctaggaaactcaaaagcattcctaggagctgcctaccccctgggaaatacaatttagctcctggggcttttacaatctccaggaaaatgaagatctacccctgggatcttgactctacgttcctgactgagtacagactggccccgggaacacattggttagatctgggacctgttgcactcgtaggaccctacttctggaccctagagtcaatattttgctttctgaggtcgtgaaacgctctcacaagacaccctcaccagacctccgcacaaaactgagacattcgaccactcccagaaggattagccatagccctaggaaccgcacctaaggttccaggagtaggtaaagctgctaacaggagcatgactttaattcctcgaagtgggagtaaaaggccctagaagctatgttgggcttcctagggtctatttgacccctaggagctgcttatatgctcctagaaactgcactaaagattctaggagcgagagaactcctagggctaagacgtgcgtttccggggccggcagggctgtcaacaggaacttaactggctttataagagtaggaatagagagtgtacaagttacgtacgatttcctggggccatatgattcctaggcggctcacatgttccagggtcaatttctgaagagtttacggcaatcaaggtagatagatatttatacagagcacatcgtcagccatcacctttcgtttacatcaagctatttagaatactgctctaatgttggctaatatcggcggctagtcaggtcaagcgacgaacatgctttaattctaattaggaaatttaacatctaaatgatttccgcaactcagcagtatatctattcctttccaagaccctatccgtcgcacctctaatatctatagactccaccgtcattcttcgaaaatcatcatataattctgcaattgttcttatttgtaaatactcgctgcctccgtcacagccctaccatagtaggctgttagacccgcctctttgactattttatagctcggttcgtgttctctgctagtgacctcgtaagccgcatacggcaaaacgcacaagggatataataatcactagagatccgaaagcggcctggccaacggatccataatacataatcttgtaatatagaatgtggctcctgttaaaaaactcgaaagatatttgaaaaccgtggacgcggctggcaatccagccccctaatgagagaacgattatactcacgacgatttgaatgcacccgtagtaaaaccgagcggcgcagttctcttatagccactttaggtagatcacaaggacaaacccggagatggaaaacagggctaagactagggccgcaatcaccataccatcgacgacgttgtctataagggtgtagaatgtgatgtccaaaatagagtcgctcggtatcacgaggtcggatttagcacagtctcgcaggaggactgcaaagtgtacagtggccgagttgagacgggtaagggctaaccaggtcacggtaagggaagcaatgataagacacgtccgaatcatggtcgcagaagtagtcagagacattgtgtccgcagatttccgaatgtaggaaggtaaggcaggtctcatttaaggaaacagtgacaagaagtaaagaacagcagcggaatgataaagcaggtcaacctcggagcagagtaaatttatatatactatacgctctttacacaaatgctgccttaataagagatagcgcagttgatagtaaggcgtactaggtgcctttttcatgctttgttgcctcagtggcaatcattataggcacagtaagaatgtttcaagtagaagcactatttctatcttaagatcgacggccacggaaagtattcctgatacttggtagtaaagcagctctatgaatcacttcgtgtattcctaggatctactatccggtgaaacggggctactatatcatcattatctccaggacgacggattaggtatagcatatcttaagataagtggtgattctagaaaaatattcgatacagatagagattgccttggtatttttgcgatatatcactttgctatactcgaggaacattttctttactattaattgggaaagtccccacttccataggaagacaaatctctattttctgccatttttattgagcttactgtatttctttgccagctagcttagggtctgcttccaaccatatagcaacccttattgttcgttaaactaaggcagccgattaagaatcgattctgaactgtgaaatctaaccaaataccgctaataagtaggtaactaacatagatcaagtaggaattctctgtatacacatgctgttggtattaagtaatcatattcaacgttaatataaacgttgatctgaccccagtcaccacccgtataccgacaaaggtggttatccgagaatactcggtaaatatatcagtacgatactaccaagctatcgtagacgaggccaaaggccctagcgctcctagaagcacaaataagactccgccagtcgcctattttactgattttactatggctttttgtgcagctgaatcataacgcaataacaagtccctagatataggaaatgtatctcccttccgtatttttctatttataaccaacttctggaggcagtgataggtcggcgcccgtttacctgggcactaattagagggcgagcggggtaaaccaccgaggcaaaaccctataggtcctataggtagagaactacggagtatagcgaagtacaaaatactaactctagatacattcaagctagtagaaaatattcctacttatctatattagtaagttagtgatttaatatagcacctgcgaccccgagagctttaaggcagagaccacgaagcaggccctagagcgcctcgtaggcgcagctggacttaacgcaatttgagcattccgagctccctatatatatagaagtctggtagctttcaggctttcagcgccacgttttcatttattactctgaggtggattacgtatataggttagctaagtggcagatccaggaaataaaacacttacctaacaatagatatagatgcagccccggcctttagcgcattttgtgtcacttgtaagagtatcgtttactctacatcttgattactatttaaacctttatagatcctaggagatagtcacaaattataaataatagagacaaatttaaaggtatggcttttaataggtctcaattagtttaggcaccccgggccctttattttctactactaactagatcttttaagtgactagatatacctagagggctataaattcctcccctacccctttttattatataataatttgtagaccacttaatagtcgagtaggccttgcgctcaaggcagcctaagaatttcttttttgtaagtttactttttaaaacgactgcgagcttcttattagttcttaaccaagatcgtttgggttctcctttatattatctcaagctctgtctatcgaagcccgattgccgcgatggcgataaagcctacccctggctatttagatatcggcctcgagtttgatcgcttaaaggacgttaaggtaatatctctcaatacaaaacttgtggcttttatcgaaaaagctcattcatcgcttcagtcataaggaatttttaagcaataggattactataagagatctctcctttattatactactatagggaactgtataaacctccttctatatcttctgcaaagtaagctagatgttgattcttatgactagtaggggcagacagcactctcctaggctaccgagtacggcttattagctattatagaaaccttactaaagtaaggagcaaatatcaatttatccgattataagggcggcacaccgttagtatagctgatatataccggtaaccctaaaatggtagatatagcggtaactaaggcttacctaagagagaggggtataaaagaagtcaaattaagaggtatcaagtcggcctaggtttaggttttaagttattctcatttactccgatatattcgcccttgtatctgaggcgcccgatgatatggcgaaagcccattctatactataccaatacatatattagataaatgttataactaaggtagctggaaagcactgcggcgagaggttagactatccgatttcacactattgttatctttcttttatgttaatttagacttattaaagtggagacaaaaacaagcaagtttatttgagtataatagatatacagatatatattttattagtaaaaactctagtcttacctagcgatatagagctatagggtaagggtatacgtactcgtttccactttagcccgtagcggggctggtacattcgaccccggactgtctactagaaggctttgagttcatagctctttatactagctatatattgaccgttttaagtaatataaggtcttagaacctttgtttaggatagcaaaggccctgagcgatatttaggagtaggataagacgatatattgattatctattctattaaggctataaaagcaagctagcttattatgttttaaatatgatatcataatgtcctggtgctagctctgtgtactagggactataccacagctctctgacgtagggtaatatatagctttagggctaatctaattcttcgagctgaactataatagtagagattctatagattctctattatacttagcattagtcaagtaaataccatacttttctaatgtatttttaacgagttactgtatagggatagtaaacacaactatgccttaattgatattttaaccacggtagaggtctactgtttccgaaaaacagatatagctttcttactcacaaacacgtatgtctatagtatcgctagtatctttaacaaataggttagagtgatatcactttaatcgatatacaatgatctttaaagtaaagtaacgcttaatgtaaataaactaaccctaaagagccttatgccttatccttaacaagctcgatggggttaattagttagcctaaggtaggtactattcttttatatatcagataaatcccggtgacgttctattgcatttcatataggaaagggttcttcttgagttagggggtagtgtgcctttatgggcactgcagtacaatcttgccaattcattcaaaaagtaccgcctactcctatcttatcatttaatcggtgcttagtattcttcatcttcttcatgctataatagaatagaatagaagtcgctctccgtttgcttactttgtcttattgtaatgtattcccgttcaatggatctaagaggactataataaatatatgtactagatcaattccttattaataaataggcaaacctttagagagaatacagagcagtctacatatgattataaacaagagatactccatttacttaatacagaagtcgagaagctaaagttctactataataaacctaagggaaaaacttagataatcttccgtttgatcgaagcctatgttatacctctcctcgttatactattacttctcaggtaattcattgtagctactcgattcgggcccctacccgcttataccagctataacaagggtattgtatatatattgtctatagaattgatctccactctattatccagcaaaagctttactgtacgtaatatactatattgtacagcctaagagagcggcgtcttcctattctaatctaggtcatcctttactgtcctatcttataggagataaagaaggagcttagcacagtcacctattgcagtatagtgaatgagagaccttttaaaaggtcctcgttggttgtatatcccttggtatttaagcgttgcctatatattgtgaagaaacgctataacgtctttatcaaagtatatctctctaatgccttttaggtattaaaattcactattaatgatagtcatagagcgaggaggaattaccatagtgattgtaggtaccccgggatggttacaaaaaagctatataaagagataccagaggcttgtttggttattaaggaagcggaaagataggaatttctatatatatcgcgatcgtccgctttatatagcaagtgttcaaactgtacactacttatatacaatagaacgggcctatatagaatagtcgattgaataggtgatggatattatcagtttatatggttatttatttgcgtccgctaagtagggttttttatattcaacgatagatcaagttactaagggttgttggcaacccgaattcaaatttagggtagttaaaaaaggaggaggataaatagaaaaccaataaaagtggcctactaagcccgatgaataacatagctggtccgatttcgaagtttcggccatagtctagagtctatatatcagtgtccgccttaacgcaggtaaaagccccggacaattcttgctgcactggacatcagtggtgcctaatagtcgggtcttctattattatatacttttagaccgtatataagtagtagatctttgtccggggtatgtcaaattatgaccagtggcgcgctgaggagttaaggcacaattcgttgaatttttctagtatagcttaggcctacagaatataatgtatatttctgatagccagttagtttcgaaggctaaaaaataataagaaggtataatggagtccaataagattcaattggaacaaattgcgatcaatatactcatatgccttctataacgatacgagacggctacctgcgaactgatatcgcctataccagatataaaccaacatccaatacagagcgtttatagtctcagtgtggaaaaccaggagaacttccaacgctaatatcaaagcgagttttcgcgaagccatgatacctattatcccgcaaatatactcgcactccccatcgagttgctgtatgatgccctagattatctatccacggaggatttggtctcgttcgcattttgtcgataggacctgtttcaagctctgattagcttccttgaacgcaaagcaaggccatctctacaagatcttggcctcttagtcacactgttcgaggaacagtggctaaagaaatagcttcaaattatcgtcccgatctgcgctagatccgaacagccgatattgagagatcttgagacacttgtgaagttattcgaagatagtcattggctgaaagagcagctccgagatatcattatagtatcagctagacgtgaccaaccaaccgtgcacagttatgtcgagcttggatttgaagagctgacttgccggcatttgcgaaaaaggccgcatacactatttgatacgaacattctccacatgacagctttacacggaacggaaatgatgtatttataaagataatttttcttcgcgtagatagcaatatcactaggcacggcctcgtccacacaggaatcacttttgaatttagaaagaacataattgaacgcattagaaggaggccgagggagagctctccatcccagtagagcacaccactgcagctcacaagctattaatgtggctgtcaatcaaaaggctgatacaccctgaaagatatgatgaggactatgtcatgcggttggaagaagagcgcggtctcatcagtatatacggccaaggcgagatctcatacactgccgataacagtcaattaccaatggatagcgcggtcttatcagcatatacggccaaggcgagatctcatacactgccgataacagtcaattaacaatggattgcgactctaaaggtactcgacccggtgtgaacggtgtaggacagcacgtcaatattgatatcgacaaatttggaaacttggatctggatgctacgactgctaggcgctactacaatagctactttaagcacatgttcaagctccacccattccttatagaaagtgaacttaggattaaggtcgatagctttatctaaagctattgttaagttaataattcaccactaagctctgtttccagctacgctcgaccggctcgtgatggtccgcctctagccaaaaagaggcagttaaatgaaaacctgagtatacgcggcgagttattggagcctatctctaacccactacggccatgagtcggtaaaaacattgatactgccttaatcctgctgtgcctggcccttggggccatttgcgaagctcctgcccctctccctaggcccgttatggataagaagattgactaccttaactagtatatccctgctccgctggcactattcaattctccgctgcctgcaattacgatatatattacggatgctaatggtgtgcttccccctgtaaactctggcttagcggccgtatagacgttgctttcgaatcctctctatagtgtaccagcctagcctattggctaagctttcctaaacagtttatctaacaatcatatagaaggcttgttaaggagagatgttataaatacacgggataaataagggaatataaggaactaccaggctatccctagattgactctctatagatatacaaccgcaatactgggctatctgtagggtggaaatgagctagaatatattcagtgcggcttgcttgctggactttatataggctagttagcccaccctttctagagccacagttagatttcttaggtattgagggcttactagattcttgtgagaactaagcggtatgggtaacttaataagggagctacgaaggacttgtacgattttacgtactagacctgtctgtaattggagagtgaccttctcatagagctcgatattctagcgagtggtatctcctatttagaaggttggatacctattccgaaaggaaaatggacgatatttctaccaaataatcttactataccagagacgataataatactgttttattctacctaaatctatctatacaaaatcttgaatcgagtacatatagacttatataaggttgaaaagtaagactagatataatggtcgtttaccgtttaagaagctcttagcctgaacctcgaccgctggcgtgaaagtctacccgacagcatataataggacgaaagtgatccgccggtaaacgaaatcaacgctgcccgtatatatactaagtattacagtgcccggtatattatccaccgaccccttctctattatatactacactacggctatataggtactcgcgccggtccgatcagctagaattcaatggaattacctgtattctaataattgcccccctctatactatatagctccgcttacactccgagtatatcgagtgatataggctctacgctggccacaatctctactaactggcagctacctgaggtccgattatataagctgccgaagaagctgaaatctgtataccatatctgtattagttcggctattaagagcacagaggcatttgacagagtaggaggatatcggttagtcgttaccaatatctttaggactgcctatacataagggatcctctggccctagtctcaaaaatcacgaatatagaggaaagacttacatgttttctttataggcaattcagtaatatactcgtcctatctgtaagttttatattaggtctaaaggagcttatcgagctagagcaacttaagcgcctcctcgtccgtaccataggctttcttatttaaagcgaaaacatatctctaacctttcgcgccgatactcgcattctcactgagatatacgagaagatctttaataaacctcctaacttgaagcaggccactagaatgagagtcccttgattgtatatctaacgttaatagtattctctttgtctagagtaccttctgctaataagcctatctaaaatggctaccttttatggctgccttttatagatataactaactcgaaagtaaagtagggagccctaggctagtcgatttaagggctcatatacctaggtaatattttcttccgcaactgtatactaagagaccgaaaaatatatacttattgaaattcgtcgtatattcgactgcctaagaactctacagcactctgtggtactatggtcgtgctaaaccccagctagctcttaggactaaaaacggaagattaatttaaattggtattactataaatagtggtaacggatatcaagatcctcctgtggtaagaaaagactgaactgaaataaaaacaaggaaatattcaagtaatagcgatcgtatctttagtcattatttaggataaagagattagattatatttctatgagagatagaaaaacggtggaagaggaggaatagataggttgattaattatctcaaatagcggcctgctatatgtataaagccgatttagattggctggggaacggagggcatggccctcacttgtccgatagggtctgttataccagagaccatactgcgcgggactagaggccttagtcgctaattaaatatagggctgtaactaataacagctaaccgatctatctatcctctaatcatgtaaagaatcttattacccgcgaagagcactaaccgacttaggggcacctagctaggagcccttaatctagttagtctccgatagccataggacttactagactagcagcactcaagtaagtactactgatagatttgattattctagaaactgttgtatgcgagagtataacattaccggtaataacataagtattgggataagatttcggtatataagtacttatatagtttcctagcaatatgcacgctgtgttatttgctataaacagtctagatttttctatataaatcgcgatcctaaattaaaaccagaagtgctaaatcgcgataataactattaaaatggactatagtatctattattatcttaagtggagaccctcgataatatacaaaatcgaatatacagctgaagccattgataagtcatattcgaaagaagactctggtatagattaggaagtaagccgctttattagaattagctccgaaatgtctatatagacaactaagttgatttataattaactgggctccgtgttatatatataacctcatcttttcctctagaataaaatacaattaatatacctctgaactataatatattgtaagacaccactactagtctagaaagcggtctaaaatacggtggcttcattgactatctaatcaagagttataagaccgtcggatttattctcctggaattaagtcgcaagagtataaaggtataattggatacgaaaactactaatatcggtacaaaaagaagagaactctgtagaagaattcatacttaaaggtacgtttaacctcccgctcattagacttaatacctagaaaataaatcctagatacgctattacggcttctagagatacctagcaacctagctaaagaaaccattcttacgaattttgttggcctaagactggtcagaaaggtatggctcattagatttatcctctgttatgttctcgtcgcccgatgagttagtagtattctccttttgccgacgatctaattggcttcgttgcttcgcggatacgataaagcgctccttaaagaccgaccgcattgcaattctcgtgccctgtttgaaggtgcctagatacgagataatgaatagtatagtgttataaaccttagtaggatctttttttttatcgctaaattcaccatatattattagaaatagaagtcgaaatactgcgtcctgtactcgagatttatcgccccttacagcttgataacgcttatacctgagtttataatcggttttataggcccttaaatcggcaaaaatattatcaattaactgcctagcaagtatatcaaccccgaggaaatcatatatttcacagagagtgtaatattaagggatatcgccttataaagagcgaaaacattaccgatagcctgattctaagcccctgagagtaatattaaataaagtaatattactgtaaataaattcagtttttcgcagctaggaaagacgttaaaagctgacaaaggctgataaatatggtatcgtcgagatattaatattatagaaagtatccctaatttcgagtattattttgtgagaatttgatttaaccgctttagtcgaacccattttgtcgccgagtttcaaataaagatcattgggtaatatcctactcccttctctctttaaaactataaggctatcacttcgactattatattttacgatagcattcctactattctctcttaccactctaatgattcccttaaccaatacaactaatctctaaaggttattagtatagtttcgttcctattcagtaatcttataagtgatgtctttgacctccggtagtctaaatataccactattgtggtaggcacggataaggttaggtgtttgtgatacctatagctatagaagaacttcttagatgttaaacggcttatgggacacttgtgttttgatcttaagggttgaattaattaggatagattttccttttttctaaaccactaatttagacttggtaataagacgagagtaagtttcgggttgtgaaagagacagattttccatcatattcagaaaattcttattttccgaacctataccttaaggttaaagatttgcagcttctttaatataagcgtcagtcttgtagtgtactataaattttaaatcgcctaagttataggagataatccgatgatatctagtgctaccggatacttgggtatttataaacgctttctcaaacttgtgaccgtagtctctgaagtagtgtggcccgataaatgtatatatttcggtttctgcctagtaaaatattgctatattacttatagtcttaattttaatggtaaaaggctccagtccatttctagagagatttggattaatgaacgacagaagtttgcggatattatttcgattagttatcaagtcaacttaatatatgttatataaaggcttttcagtgtatagtaagcgaaaaagtggtttaagcggacttttaggatagcaaaacgcgttttgagtaatataaatgagcctaaagtctttagccacttttttagaggtttggggtagagaccatagaggcgggcagctagggatagcaatagtagggctggacgattcgatctaattataagaagataaatgctctatattcgtgatagatagctggatcttcttaatatctattaactctaggcgaggtatatctacgatctaaatagaacctattgttactttacttggttagtgatattatgatagctaaggtaaatgagatttagattaagtcccttgagatatttaatcagtataagtcctatatattaccctgtatgggtttagataatatatacttatataatctagccttaccttatatatactctttgtctagtttgtatagaacctttagatatccctgtaggactcttatttaccgaataggagattagaaaaggaagagataggtaaaaggaccctataggtaatactaataatgatactaaatgtaaagtgtgaagtgataatttagctacctataggattatctatatagaccgtactctagactatcatttgatactattaaagccataggttaggtagaatcctagtaattgtgcgcttactacaactagtagccttacctgtctaataggtactaagtttaccactctataatacctcagtgctaatagaaaccatatatgtcctagatataatctattagatgtaatagtattacgttagttcgcttctcttagaggcggtaacacagtgtaaaattataggaagatattgataggataacaactgctaggagtctaggattatcggggttgttaaagtctatctctagcctacttagggttaaggggcgcagatacttctgcgaatacctagaacccctttagaggtaacaaccagctcatactatataagacgagaaagggaaacgaagtcatgtaataaattgtcaagttactgcatgtaaggcggccctcccgcgtgatttatatactgtaggtttaacttaagttccgccgctactacaaataaagtactatagaccacttaaaaaaggtgcttattcttattaagcctctctatctagaggctctaactcttaactatcgaaattaccatcgggaaaattctaataggtaaaaaacctgattgtctagcaagtactatgaaatgttaaacaagtacctaggagatctattttattagaagagaatcaagctaggtaaccctaaactctaacgaccatacgaagtatataaaatagatgtgacctagtagtgtttagcctataaggaaggtgctcttggggtatagtatttggaattaaagttgggctgagcaggacgataaaccgaataccgctcttaagttcgggtcaattatgtgatttaaggtatataaaatgacctaaatgttacagatgatcggttattttaggagtaactatattatgagctttagtacctagcgggaaattgtagcctagcttatccttacctatcttagtcttagatacgtcctgtatcctttatcgtgactagcagtacgcctagtgtctagccatgcctatgtctgagataggctataatttgatttcatatatgtactaaagctcagatccctttccgattatgaatgataggctgtttcgtagcgctagcctactctatatttattctaatactactcggatcacctcagcgcttgtaatatgatactaggaaaatatatacgttaattagccgtagggatatatgggcctttacactcgggtttagcgactagaaggatatatggacagctataccgtggactatatacctttgagtatagattttggtataataatatatattttagcatatgatatctttgaatacattcaattctataaatctactatatattatatctttcgagggccaaaatcgttagtgaaatcaataggtatgaagtagagagatgtaatatcggatgatactgattaaaaagtacttttagccgtctccttcgatagcccttatcgtaataacagcaagttctggtcaagccggctcctataggaatgcaaagtgtaaccactggaatgatatacacaataggtatatatataaagcagcgggttatcggaaataatggaaaatttgctaaacgggcgaccacagaatctctgggaaataggctatttgctcgaaatgcgaggcttaccccgctggtaggcctaacggctttgaagagtggattaatctgacgatctaaatactttagtttatacggctaagctattaactgataaacgattgataaccatcctcttgaccgctatctaaattgatattatcaccgttgtcgtcggagcttttaatatcgatctaggaataccgatataaaggtttttcatttactggataccctgtagacctaagctaactaaaaattccgcgagttgcagcctctgaagctacctgggaaaataagtttgagttattttgtatcgggtagtagttttccttatatttctttgttaggaattccctacgaaactctattagagatatgccggagtctttgagcgtttctccatttgctagattccagttctaggttttgtactttaaacagtgatagcggtaagcggtatattgctgtactgtaatttcagtattaagaagtcgagtttctctaaacagtttctatggatgaatggggggtctagtatatccattataagctgtaataaatagtaaacgatactcgtcttccctgtagattatttaaccgttattagtaccaggttctacggttataaaagattggtacattcttgtctaagccgctacattgaagtccgtggctgtaagcccgatccggatatttcgtattatagggtttactagtcctaccacaattgcaccgagctaaaggctagctaatctgggctgccgatatataaggaccttggcgagtataagaggcttcttgccctagactaaagggtttgttattacaaagataggattaagccaggcgctaataaggttgcatttaatctctctgttaaagaaggtactagaaagtaaagatcgcataccccacgcattataactcagtatcatataatgggaaagatattcagagtattcctttactagatttgaggatttttgtgatagagacgatagtctatagtataaggctgatttcgggataggaagcgaaatggaatctccgctaagtaataggatataaagcgtagtaactagggccacggaacactgcctatagagtcggtaacaggagcaaaacctggctagatattctaaagtagtactagataacggtagtcctaccttagagattagacaacctcctactatccctatattaactttattggagagaataatagactaaggtgagtagtatattttttttttataatctattattatttcctagccgccgccagagtgtaatatagccccctactaagctgcttcagcagctttaatatcgtgtctaatatcaatttcgattatatcgcggtatctggtacctattataagctgaccggccttatacgtgaatttactactgtattagtatcctaaagtgtattctagtgattctgcctatcgtgtagaaaggatataagcccacgtaaggaataaaacgctaatataatttccctcgttatggttcgagataccattaacaccaggccattcttataggggggtagattttaatatctctactatcaatagattgggaatagccagcagaatatctaaagccattgttttcggttcaaggcaatattgcccatataaagtagtctagattgattgtctagtgattagaagactaaactgtcccctgctcgattccctttcaatataagtaaagggtagttcagtgtctttgggcaccagaccatatctaaggaaagacggtattcttttgagaagcgattttagatcgatggaagaaggtgggagataaggggttttatgagtatttgttaggtaggacgaccatttatcatagctttcggaaaggatacgatcgaaattttctttacttggacgaacggcattatctatatcagacttagactatatagttgagtctaaggcactgccgctataaatctagcggagtgctagactgactagttcgaataaaaaaaaaaatatctaggggcttctcttataaacgccagataattaataggtaaaatgacgtataaagctaatgatttagatgtatctaaggaataaaaatagtaatattagtaagttctgggggaagggaagttgggattgtacttaaattaacgagatggtagttggtcgaacaccctggtaatatatgtctattattactaagcattctttgtttttccgttccgaaatatcctttatatatacaatcgggaaaaaagttatgtatacgctgtaataagctaatcctactgtcgtaagaggctgctaaaaaggttatatataataacaaaacctagggtttaataactgcgtttccttatcccaattatagctagctctatagggggctaattaggtctacgttgtataataagggtattagatagaaatcaaggtatagtgagtatattggtaaaattcacaatggtaagattctctaactaaggcccgaatttgataaactagtccgatataattaataagtaaaacgcttagttaaaaaagttatatatttcagcggtaaaaagaccgggtaatcaatgttacgccttatttcttaatactaggatatagtcctaggagctagattagagttcctaagggatacctacctcctagaattgctattaaggtttctagggtcaatgtattaattactagagttaaattaataagtaagagaattcgtcgagattctgctagcccccgagttgtattttctgctaataaggtccgtctagtcgattgtactaatctagtgtaccgcctctatatatattcctaaggcaaaaaggctactatctacactgcaggtatgtgaatcttagtctgacctattctggagttccactgatcctgaagtcgatacaattttaatagaattgaggacattcaaccataacgtataagcgtaaggactatagctctttaccatctcttcgtctgtagctttggctacccgactatctaagtcatatattatattaccggtctataagctaaatatatgacagtggaaccattaatattgtaccagagtggccctgaggatacagtacctatattagtattctgtataaagctatagccgatatactagaccttatcctatcgctttataccatatagcacaccctaggtaaagtatataacttaaatgaaagggctaataatagggtgcgaatatccgattgcgaaattcgctatatagaagcttgaaacgtctattcttcccgttaaggtaagtgatttatcgtgccttctgctatactatatccagttattcgtgcaatattttgcgctctataacatgaataccattgctgatatttatactattgtagataggagcagcctatcgctatctgtgaaatatacttataaggagtccttttatcctaggtccgagataagacctaggttactataacgcgtgctctatcgtgtcttcccctttcgaccacactgcctttataccatgatagtggggtgggatattcgccatctgtatcgtgaggtcttatcctattacaattgtacaatttcttattataggtaggttcgtcgcgcgcctttagggcttagaagttacccggtatatctggcgcggcttcttcgaagtaatagccggagagtacaacgaactagatataacattatattaatatggtataaatggtgactgtattactgaagacgattgtaagtgatctttatcggtaagatatgactataaagctaattaattgactcgttctaagtaaaaattctgtgatctttataaactagtaagttataaccactcgtcctagtagtttaagccttactaaatcggattgtataatagggggtactgtcatgttcctattactcaagtcgaagcgcgcaagtgtattgtctgctcgggctccctaataccgatgcgatcctatactctatcaccccgaaatgaccattggtagtatcgataataagctaatataaagttctgatcgcctttaccttcgcccttctctctcaatcgactctgtaccttacttaggttatatactgatgcgtctacgctatatataccctaaattccaatggcttataccactgtatatcttattcgaatattgtgaacgaatagcccttatgaattagactagtggtgtctaatgggtggccctacgttattctcggatggtatctggcgtattttaaagccgaatatttcctacaggcgctaggaaataccgatgtttcgtcttatttaatggcaagggagccctaccttcgccgttagctatattgttagtccaaatccgtgtgcaaggggaaggtaaggcaaaactcccttcgtttctgacctataggctaatttcggtactagctataaaccgagaagataaggccgtttataccgaggtacagccgagctaactaaagagccaaaaataccgtccgatactgtcctatctgatcctactccgcattacttaggtgttcgagatatacgaacgagcggaaacggaccaatgggaaatatacgaagctattaagtcggtattagaaatgtctcctttagaacagatatttagtagatttggatcctaagtacccattcctctataaaaccccaatagatatctatagagtcgtatacgccttagatatcactgaaactgtaggtcattaagctggccgtatatctctatctattgatattgttttctaacctattgcgcgtaagcagctcctaccatagactcgtcggattctgtataccatacgtcggctatcctttcagtattaagtatatatttgttaaacttaccacgccctggacgacatttggtatattactgttcaagtatatcctttataaaggtgagtttcagtctgtaataataccacctagagctatcctactgcgttctatcggcagcagagtaagcttaattgtataaacccgggtactatgccccggaaagtaacgaccggcggttcggacgtagtattggatattgatatatagggtacgatatgaattatagttactaacggggggattacttacaatgttgcggtaactcccgaatataggagccgatcggatattcttggttggttttctttattgtgaatccactttcacccttgggatggttctaggatatagctatcctatagtagagtaagcttaagtgacttacaatcgccgactaaagcgatgacttcgaataagaaggcagagtctattatatcacgatgtttaattaagctaataaatggtatttcgagcggttccttataaatacttctatacctagtaggtctaatcttaagcgtatgtattgcctatatatagttgaactaacggagggcagtctagggtttacattcgaccagctcaattgaagtaggggctgtatataaattcaccgagtgattagaatggtactagagatagcttatgagatagaatcaataaattgatatatctattatatggatgagatggtaagaaaacctccgtgttatatctagggatattgatcgacctcgactcagcctacgaggcctatggattcgtaataacttacttctacctgtctataggtgggcatggcgttggttggcctatggccgcttattaataagcccttaatatatgtatttactttacaatgttttagctacgtataggtcccacaatgctatgtatttagattagttagatagaagtatatataacagaagagatggattgaactaagcttattaaagcggtggactgttgagtctgtgatgctagtggcgtacggttggataagagggctactagtaagatctgacctgaatgaccctcaagggtctgtatttttgagctccaggtttgctgaaacggtggaaactaatatatctaataagaattcttattttaaaattgtctgcgtattaccccccttctttagtgtaaagttaaaccctaagcagtgagtaaagttgaagggacgtattatcggcttttaggtctaagcgccttctgtcaatcagagtctaagtaaatacagaatagcagtcgcatttcttctattttagtcatattcgagggatattgaccctattgcgattggcagtatacggaattgatagcgttgtaaaatgtgcgatgtcattttcattagacccgaactgtggagccacgctttacttactttaagattaaaatattttatattagaagggataagatatttagctcaaccttttctattaaaacgagtgaaatatatacgctccaccggcctctaacacatatatcgcttatcggctagtatttaattagactgattgtagattaagtttcaaattccttttatccctactcagggtacctaagcggggacttgacagaagattgaactttagtctttcctttcttattcttcttcttgctacttatgcttaaaatagaggttgtggatagcggtatcggctccacagtatactgctcgatggtatactcgggttgtggagtcagttctgataacgtagggctgtacgataggactacactttctgaatcatagctactactaacagcttccacaagtagttcgattgagctgtaagagccctcggacagtgcttcctggtcctattaagccctagacccaggcctatcgtttgtatctaatggtccgattagtgtatgtgtaacctaatgtgagtttatttcccttaccaagtcctcttatactaataaaacgccggtatatattagagccctttgtcagaatccacaattttctatttaactgctcccttaggctttggctttcttccgattcacctacaatcttagagaccaagtcttcaggtatcttaaacgtagtaataggtataaagagtgctggcagagcggtaaggagttttatttcgatcacttcagtggcgacgttattaataaaacgtttcagtgtaacctatactcagtagtatcgagattaatgggatatttagaacagtatagaggtcacgcgtcttaccttatagtatacaagcatgcagtccagtgcctcctctaaagtaaatcgagtcatatctagtgtgcttttctaaacaagggagttgtaaaggccccagagattgatagtatatcccacagggtgggaggtcgaaagtgtattagccccaaagtatgattgtagagccttacggaacgcttcgttttggcgatcagctcgagtgtcttgcagggttttagtaaagtagtgattgtaagtaattggatagcctcgttaatgcgatataaggaactctctactccctttttctagggtatactgtaagcttcctagagctggtaaaactatcttattaaaaatggttttcgaggtagccccgtctgccatatagcagactgtatgttaaagaaaatcccttatagctgcccaagccctgtcaatatagctttgcgtgatatctccctatagggcgcactattcttaaaacaaatctttaacgattataggattatatattctaggcaactctcgacctcttgtcttcttaagaagtatttcaatatactaaacatattcgtcttgtgtgattgacatttgatatttagataccaatcgtctatcttcgtctataataatatatcgtgaatagccgcgtagggagatcttcttcgtgaattgcttatttaagttctgaatgactgctcggatttacttttggtagccagtgtctgtttttacatctctaaagaaaggctcgctgtatatgccttctacggctactttgataagagactggaaagcttgacctatatgtaaaagatacgacctttacttaaacactgttgcctaagggtcgccgagtttctgcagctgtaattggcaagacttgacttttatattgatctcgttaataaggctagggagttcgcttacgatctagccaagaagtagaccgctcagacgcgttctcagagagtctacgcctacaagtgatagcggaagctctttctaaattccttaggagaaaaactcgtattcccgaacgttttagtcaaacagacttgacttacctttctccgagtctatattcttcaaaatataccatcctagacagaactccacctcttgattcttagtaagcgatataaacgaagctttactctcagatcctagcactaatatattaggcttagagataacgcctagagtcctgattctagatagatcagtatcccgtgctaaatgtagaacgatctggtttataaagttattctttacagagataatagcaaggatgacacttcggggctctcgtatatacgattggactatatcttaaaccaactgaatatcggctgccgactgctgctgtgtttctaagtagatcagtcccggaagattaataattgtaagatgtggccgatctaggccagagaccttaactcgcagaaggttatttgaaaacgcttttctgtaggttgagattcctattgctgcctttgcgttctctatcaactctgtaagaccattgaaatcattgagtgattcacaaaagctgctaagcgaatgctgctctgtatcgctgcgggattgataggggataatagaaacccggactcctacttacgaattcttctgtagaactaattcggttagaaatctagtgcagagactacttttcactagaaaagagataccggagatagctttaagaacggagctttttccagaagattggtcaccgcagacgatgatctgtggaagggagacatagtggctgataccttaggatcggagggtatcgatggaatctaaaagatccagctgctcttaagtgtataagccttcaagcgcctctgtcttaaattgcgttaaggttatggtgatactgagaattggagacacggatggagtggttaatattgttagaataagtagcttaggttttaataaatattggggcagcctactagatgtgtatatttatattccgctagactgcccgttcctttctaaatatattacctcctcgataccagagtatatagtagggggtattctttctataggctgtcttgattgcgttagacctagagtgtagtctccttactgtagaactagggaggaatgtttgctatttaaaaattcaaggtcgttttgtttgatatgaaactgcattcgcttatagttactgactggctattagagatcttccgatataagctttgcctttttcggtcttttaaatagagttccgttttaatttaattgggaaatagatcggcggatcgaccaccccctatgcaccgaaaaaaaagtacgcatattatagattcgtttgctaattctaattacactctgcctattgtaagggattctagggctagtaagagcgttttctaagattaaggtatttatctttctaaaagtgggtattatatctgctttaaggttataatgaccaagtaggttgatatcgaggcaggtctttcatttataggcttttaacgttactttagaatagttaattgggagatatttctatctccccttatacgaatacttcatcttcgatagttagaactagagtcaactactgtattctaattattactataaatctacactctccttctactgtctacgagctttagtgaatcttatatctgaatagcaaaaatattcctaatttttttgactctttatacgcgataaatgcttccggctaagaaataaaagcctatagctatatggtctatatacaaaaatctttataataaggtgttaagtttgctggttaaaccagatctttactatgagttctatgagaatgataataatatgagtttaactaatatacgtgatataaatgttatgggccgctttatatatcataatcgagcttgtagagctcgtggatggtctagtaatatgatcgctattactattcatctatttccggggcagaaatataatacaagggtataccactaacgctgtaaattttgctactagctgagccgaccggtattagaccagtcatatactgagaggattgtctactagattaggcaatggaacggaatccatatggagaggcctctaatatcctatgatagcaaaggtccctataactggcagctttgtgagggatataaagctggatactgctcttaagcagatgaggattaggtagtataactagatcggtttattagttgcaagttataagagaagagctatatattaacacttttttagattgatactatagcgacttggagttggagtatggtcgaccgacgaatatatgaattaaaaaattcctttatattatggttatatcaacgcggagtcatattagaggtttaaatggaagggtaaatcgtattgtatctgttacttgtaaaactcgtttatagacggcggacttttatcgtaaaatgaattcaaaatgttattaaaatattcttattccttaatcgactattaatagacctagtatatttaatatcgatccagctcagctgaaattaacaatcttttacccatttggacccagaaacagtttgggaaactagggataacaatctttttccttaatatacatatggtataactcatactccttggtttatgaaaaccttaaattgcagttcagcttctctttattatactatcactctatgtttatatatggaatccttagagctaagtaacagttctagattgggagatcctttagggattgtcactatatcttcaatttcgacttcttacaaccgtagtctatgagctcgagtttgatggccatatattagctcttctaccactggatttgcctttatataaagatcgcgcaatggcttaccctgagaggcctctaggagttcgactaacaatttaaagtccgcctcctttaagtcgtagatcctttaaaatgtcagttacctataggtataatcccgcagggtatatatatattatctgaaactcctttgtccagctctcctattaataagcatggctgtaagaggtatattatactctgcctaaaattgtttactagggtttggtatcgttatccgatgattcgtaatcgcgttattgccctacgtcttcgtttgtacttaggattatctgtcgataattgtggaaagacctcccttatcattctctccgtaattatagtattgttattgtgatttaggttgccctttttttgagccttaggcgggaaggattcgactgtataaaaaaccgagtttatagaggtacggctttgaagccctctatagtctcgaaaaagttctattaggtggtagcgtttgagaagaacattgagggcaaactttctatcgagacgatttataatttcgtatcggtccttcttggatgtctgtcgcgatactatttctcctgaggataagttggagcttagtagggcattttttagatagataaaagcactagcattagtaatataaatgagaatggttcctaatgggtccgaagagcggagtgtggttagaagcctttgcttgatatatctttggaaatatgtttcatacggtaaagggtgcccttttgcttcgcatttctggctttccctctctagaaagccactatacttgatttttggacttatcgctgtatacttctctggtctattactcagttgggtactgctgtgctgttttctagagacttggctgatatatagctctttcaaaacttaaacaatcgctttactttggttgctaggctctaggcctgcctaacagtgttccttaatacgtgaaggtagatcttataacgagaggtaagcggtcataggaactatcggtaaggaataattataagagctataaaggggatattctaaatctagagggataggtacattcgtcgcttataggacctcgccctctggagaacagggtcgagaatgattcacagaatgtatatctaaatcatttaaagcctaggtttccgggttatcgctaaaggttagcgatagaggtatagtgatgtccggtatagagcttagaactatctgctctgtaccgacttaaacgctattaatggccctgttattaggagatggaatagatggaagtggagttttatgtagtggatttgattagattagtgagatgtcgctagtacttggaagatatctaggcctttagaagtcttcttctataggttgagcggtagtaatctcgtaagcttctaaaagcatttttcccttgccttcccgaagaaacctgtcctagaattaatgatactttagataaagggcctaagctaacttacctaagccgcagtatactatctaacactagatctaaactactggtccctatcccaattactgctataagggcgctaacggccgaagcgagactattcttagccctatgtctactcgtgctgtatttaattaacttattaatgccgttcccttgcgcaatataggctcgactcttaacagtattatagtcggcccgtaccgctgatatcaatcctgtattatattagaaggctttcttcttctctgattctttaatataccccttgttttggtagacttagacgccttatgaccaattttcgcaatcgaagtattaattaaagatattccgatttgtgtaagtgttttgaagctatctaggatatttggattaatactagcggctgttaaagcttagtgtataagcttattaggcagtgcctaaatgccgaaaagagctcagacttacttagccttagtaacgtttattgtggtatttattgtgctaatttacttgtgaagagtataggaagaataactaccttcctccgctataattagtgtgatttatactcgccaatatatatataccgacttttcgaaacttgtatagttgaggaagagaatcaaggtatatatatattcaatataagtagctaataggaatatagctctataatagtagcctgtatagagtaagctttcatcttcctgctaagccattagcttagtaggtcaaatacgtggtataatatataagaatagtattattatagaaatcatgtgtaagaaaaactgtaacagagaatttgctaatgttttaactctatcctctatattgctataagcgatatatattgggttcctactaaaaaaactaggctgttattagttagatattaaattgcctgtggtgactgctagctgaagttaataacttaaaagaggcggtgaaacggtttgtcctatttgatatgccataaggggtctagagtactaagggctttatactgtactatatccaggactatcgaccgacggttatcgatagtggctaaagtagggaatgattagcgtagggatgctagttgcggtttttgtaagaccatctcattagcgattatacgggaagtcttgactctttcctgtagctaatctacctttttagctcatttatatggctaaaaacgattgatggactgcttatacttaataccagaccgcttatattacagcgtggtatatgaagtctttaagtatgattcgttagtccgtctatttgtactaagaaagcagagtttaggatttgtttctaatccaccttatatatatttacttattatttgatcgcagttaggcgaatatatagcccgataatcagtcaagtatatttttagctttaaaactccttggcctatcccgcctggtgattgcttatctagagactttatctaacggatgattgaaaaaataaaaaaaaataaaaaatgattaatcgttttagtttttaattatcccttgactcgaaatatatttatcgcaataagataagcttttttagttctatttcactctaataaactaagagaagatactaaatagcttttcagaccatttaggttcttagagaatactatcggtgtctacatcctctatagggaacggtacggcttggcgtttatctttaaagactaggtaatgaatgattggaatcacgatatcacttattctgtgaagattctgcccctaggaagctttaagtatattgataaattctcggaagatctcaatgcttagggcaagtatcctgtatttattaacacttatctttcttagtaatcattaaagcagggagacgtatatatttatagaaatttttggcctaggactatcatagctgctgtaataagataacagtctaataatcctatagccgaactgatcgattaagagctatagcctctgtccaagtcttcgtaaatctaatacttttcgtcgtttatatgcgttttgttctaaatcccgtgggcatgggaaaattctttctattatcgagtctgtgatttcggcttctttgtttttcactaggtttcctttcttttttggttgagacctaagttagtccctgttaataataataatgttggtatagggggattgcatactgctactatagctacggtatagacagaccgtgtggtatagttctaatatattagagtggcgaatagttccttataaatctttaatgacttggagcctaatgctgccagataaatcatatatataccgttccgattgcgacttctctataatgacctgtaaggagcgaagagcttcctaaagtgatacaattgagctggcactagctacctgtaccaaaatggtaaatagtctattaattgaaggcttcgaagaattgaccaaagcttagagtctcagtttaatctctttctgaaagaaagtgtcttatagaggaagtaatctactttgtctgcatttcttcgttttatatagaattgatagcttctagctattttctcctgtttaggcgtttgtaatctttactttagggctggtaacggtgacttgaggtttcgtaggtagttgagcggaaataccaggcgacgaggaatctttaagtgtggtaaagctacagcctatagaaagttcataggcaaaggcaggaaagcctatagagagtgtctcaagctatgctactttaggaaaccttcctagatccactaactgattatattccacgatagttatagacggcaatgatatacccctgggatttccaaatgataagtacgatacctagaaggatatgccactattgtatataggctctatcactctttcaattcctttaaatgtataatagaatgaagatatatcgtagatctcattgccctcggccgctatatcaaactcccttatttctatatcgagtggaatagacaagtaagacctagtacaaagttgttctttaaaaccggccatcaaatccaagctatctcgatttatatcgacaattctattagggttttggctagttagttaaatcattggttctatacagatatatgtaccctaaaagtataatagcccttaccacgtcttctaagttttgtattacttgccatacagctctaaccagagagttaagggctaataagagctgtaaaatagtaaattctccacttagaaagacttattctaataaagctccgatactggattgccttactataaatgcctaataggtcacgtccttagcttaagctgttaagcttgccacaatatctttaagttatcagactaggtgtcttccttctttaaggagcttaccttaagatatattcttcttcgcaccaatactagtaatcaaaaaactaataacagtctcgcctacgtgtataagcgcacggtttatacctgggggtagctcgctagtactagccacagtgaatatttccgtaatcacagtgttcgatagtacctggtagccgataagcattcgaacggaggtagtgataattgaaaacattaatactcaagtgtgtagacgatattactaaatccagagaataagagctacctgtaggctaagtaggcgggattagcctacatttatgtatctttagctccacaggtatagtcactgattacctaattagatatacgtagcacgttgctaaatattgtggagtaacacattattcttggatctaatataagtatagactgaccattccgaccagaccttataatctcactagagctaatatgaataccgaaggtcctcaatgatattatttcatgattccatcagatgtgggtcttacaatgaatgaatctatctacttctaggttgggttgattgtactttcacgatatcaaatattggaagatttttgtttcaatatattatagcctttaatacgacgataaatagacgctttgatttatctaaatagcattttcgattatctgtaaattctcttctacctagaatattgatatttgttaagagaaatggtgaaagaccatgcttacagctcgtcgtagatatagatttagccgtttactttcttttatttcttattgagctttgtcgaaactagtttaggggacttaaaagacatatacccctagagcatattttctatgatctgatgactcgttggacttggttagcctaataaaccgctgattatactctaagaccagaagctataatcatcaatagtcttcaaacgatctttaaggattgaatgaggattaaacaataaggttgtggttagatctattgctttttgctgtatatatctagcacaaattatcctcgcctttatttaaagtgacgttgcgcttacctagctccctgactctaaagcagcgatatatataagcctttattgagaacctaaaactctttttaatcttttggaaatgcgtatacttccctaatacttgctaacaatctacggaaccaacttatttagtagatcgaaggctgccacagggtagaaatagtaggtaacgtttgctacagtttcaacttcgaattttattactatatcgtccactagccgtttccaagcaacctagcaagcaaattctttatataagcgtctatttagggcatgaagtgctctactacttacctaccaatatactaaaatgtaatctagcgattccttaaatgtaaactatgctatatataggatattaaattagaggggtgattttttaagtcctcgaagatcaattgaataatggcagacctgctattcccttattagaaaaatcgtatagaagtaacgcggaaacgccaagcgtaattattcattttctagtcgatccctatttcttgtagagcctcgatatatttgtgattgcatttgatagaatcttatgtttagtatgttattagtcgctctgctatcccttttccgaaggtttcctgtgaattttttaaggctataataacctttttgtatagagtcgccgatatagcctgataagctatataaagtatgaataatgtgatgaaaaagattatttgcggcaggttagatagagaaaatatagccgagatatatattactttgtggttctttttttgaattcctaaaagaggtctcttgttctgcgaggaatataagctcccgttagtttgcaggtatatataaagataacaaattttttatctctatgatagattcttctctgtactgttctttcctgctgtatcgaatgagcgacagtggctacgtcttgaatttctttagcgaaatctatatccgtatccgagtactgcatgaccgcgcgaatgtattttgtatccctatatgaatttggaaattccccaatccttagataattttgactgtagattgaagtaattagcttttgaaaggatatagtcttagcgttcctaatgttactggccctttctgaatagctggtttaggtttgatatatatcgttttatcctttgttaccttaacgaagctagagtagttctactgtagatatctaacaaataatacgccagtcgagcgcgcttagtgtttatactaataagagattgaggtatgtctccttagtgtcttggggaaataactttaattatcggaaagttcgcttaggtagtttctagtgacttctatcgagatccacattcttcaaaatatggtatatacctccctggcattcttatctgcgcgaattatatatatgataaatcatatttggacggtcgcaagtattatataaccttagtaccgaatttcttctgtggccgttagtataacctataatatggatgtaaatacctagaacttaccatagttgcctaggtagttatatggtgttgtaacctttattatttttgtggatatacagactgtcacgtggttaatagctgcctgaaaggtcggtcgaccttgtacactgggcggtaatgatctattatttattcagttcgcagtaactaagccactaagaacagactgtatactacttcttactgtgcttcgagttatatgcttctagtgtgtcttaaatactatattgagatgttcctcaatctattaccagctgatacaaaactctctatcctttttcgcgctgagtgcagcagcaatataagctttagagaaggctacttatatatacggaaaagagacaaaagcctgctatcgcggaaagactttgataattatttctcttagaaccaaaaacccacgcggttcctatccttcggtacttggaggtaggccatatagtaacgtaaaatactagaggatgaaggaagagttgatattgttatgattgctgtgtgggtagagggtttggtaggcgtatatagtgcggaggaagctgcttctaggcttgaatatattgatatagggctgggtctaagaaagtcgccccactataaggaataccttattgaaggtggcattgctactgatgaatatcgtatccttgcggtcttcgaggggggaggccttgaatatgatgctgtcttcgaatatccttcatatcggatataagcaacaattcctagtctatgtttccttaggcggagattaagctacgcactggaggatatagaatatgagatctacagtcattcgggagttcgcgataatatgaaacgagatgtgcttgtggaagtaatcataggaaatcagctgtttttcccgactttgcggtacaagtacctagggtaaagtgaaaacctcgcttaccaccgaaccaagtctatcactaatcaaggatatcggaagacctaaaatcgttatatctcgaataaatttagtatatgattgagattggatcacttaattgctctgaaattacttttattgctaactgttgctattaaactatagggggcgggggggtggtattttactactaaggacagggttatttgtcattctctctttgtccctatatagtaaacggggtacgctcaatataccagcgttatatcacgctgagaacgactcctgagatccgataacgctttaacagcacgatctagatagaaaaacaattaatgtatctcaatgggacacctaatactagtatatactagtatctgtagcgaaaagaaagtataattttggtcatttataatgtactgagactgttcttgctgcttatcatttacgaccatagtatactactaggaactcgagtttcgcgctattttgcagcgatttaggggttgattattgcctagcttaggacgcttgagctgagagacttaacttgggataacaacgaggcgggatcagtaataatatataatatgtctagaggtattactaaccttgtccgtttgtattttactattcaaaatcgaaatgtgattatagtattagaattacaacagtggtgaggaagttctaaagttaaaggtaagcattcgagtataattgtgtgtctgagagtaggcctagcgatatagttttatcctatcattctagaccaggggaatggtctatatggctgtaaaatactgcggatagtgtataaggacttatgatactatatacgttcctatagggagataggataggatagtaaggggactctgggactgaaagtatctggaaccttgttagctcaagagaatatgtatgattgggtttagttgaatcggtagtcgaaaacagagtgatctatagagtgaatctgatttgcttttaacctacgcctaagttacaaggaaatcaaagttcggcacagaccatggaaccacgagcgggactgccaattagtagcgggactgtaaatcatttcgagagctcgtttggatgaaccatggaaatgccgctcggtgagagaatgtggttataataaagaatttaagtctaggagttttcctacctactttctgggctgcttgtgattaagcctttgcagcctaaaaatgggaactagaaaagaattactataatctccatcggccggtatataggataaattcactgcggtaagactaatattttattagaaagttcctttaaattcattatcttgatcaagaggcgcagattaattgaaataaagtttagggctgtaggagggccggtctacaataaaatcttatctgggggctaaccggttttagtaaaacggaggtattttatttaagcttatatggtttgtctataattggtatagttctttacaatacgtctgctagagttattgaaatagcggtagatttggagatatagagaggaagtgttgttatagcctaaagagagcaataatcatcggcttattgcaggagaagatacatagcatctagaacgtcctatagactagataggcaaatttcagcttaccacttgataggggaacttaccttcttatgactgcgactaagaatataaccatagatcgggttgtagcttaccattgtgtcgctaaagtctgcgtgttattccaaatactcacctgccccagcagtacctcctaggcaataatcccccgttctatctaatcctgacagcggctaactttaggcttgtagatcgtatctggacctttgcaattatttccattttctctctataaatagaacctccctgatctactgttccgtgggtcgccgctgagatctgcatcgcagaaccctacctgcgtctatctaagttcacgcgtggtgtttgattggcccgtcgggtgctattcgtctccagggtctcatcagtgtgatagtaacgttgcaatcttgggagggggtggcgatcataagggcctagctcgtgggccttggttgcatcagttcacatggttgtcccggaaactagacctagtttcttgtctgagcttttcaaaggtctgggccctttttagctatcatgccaaagaaagacaatcttcatcctgagattcaagtatgccaaggcctacgcgcccagggagtagatatttagtaaagacaacataagtcagctgcgagtagaaataaaagtcagcggcgcgagcctagagataaagggttgactctagtgagaccaaaatgtcatccggccaaccccaggtacagctcagcgtttccgtcgaccacaaagtatgcagcccattatttcggcatctgtcgaagcacttcaaccctcattaagaaatggtaaccgtggttaaaatggggacatgtagaatgtaagcgcgttgagcgatttaattgcaaattcgatgatatgtacgaaccatacttttgcggcgttgctttctttttaacagttgatgaaagtggttcaccacactcgacgcgcaattttgggaggaagtaggccaggtcgagacttggctctgtaggccacaaagtctccaaacacccctttaacgtcgttgaaatcgcttcaacgcttattaacgagaccgtgactctcgctaccaactgcgcaactggttccttggtagagacgtagccgaaaaaaatataaaaggagccggattcccagcctaaaaaaaatcaggacttcggtcctcacactccgatgtgtcatggtgtccctctcttgtctgcgggcttgagagtctccgtgacgacggctgtcgctgccacgagcccagtgatgtaagacttgcgctccctcgctgccacgagccaggcgagtgtaaaaaggtgcttcgcaggataggtctgcgtgaacaacaatcctcgcagggggggcgctgcgttaccaagtgaactccgcagggggacgctgtgatgacaagtgagacccgcaggagaccgctgcgttaacaagttctctgcaggagaccgctgcattaccaagttctctgcaggagaccgctgcattaccaagttctctgcagcctaggccctgcgtcaacaaagcgcctcgcagggacatctgcgacaacaagcgcctctagcccgtgcaggcacctcttcgtggtgctagggaccagtattcgagtgttccaagagtattcggagaagcaaagacctgcgcaacatcttcatcgtctgttcattgttccgaacggtcatcattggatacatagaaggggccctagttagatctttgctaatttaatagccaaaaacataaactaacaactgaagcttcttcagtaccaaatgacgtatttcacattcctttcccttggtagcttgtgatgcaatagcttcctcactataatagaaattggcatctttcatccagatgtatgcaaacagagatgagtgttgtcttggaatgcttgtggtgttgaaccgttggtgttcaaccgttggtgttaaaccgttggtgttgatgtgagtgttgatgtgagtgttgatgtgagtgttgatgtgagtgttgatgtgagtgttgatgtgagtgttgagttgagcgttgatgtgtgtggtgatgtgagtgttgatgtgagttgagtgttgatgtgtgtggtgatgagcgtggtggtgaatggtcgggcggtgaaggaggtggtcaccgtctagaccttgccatcggtccatgccaccctcagattatgtaagtttcctgaatagggggttcaacttttggaaatctatcacttatcacctacccccaataaccactagtatagcagataattgatcataataaaggtgaaccctagtatgtagtataactaatatatcgtgtttataataaattactaatgggctggtaggcattatattgtaagtggttttgtagcttcagcatgttttgtagtcatatatatatttacgcgcatcacaatttctatgtatttcggatcacactttcaatttcacttagactcgatagtccattgcttttactaggtttggttatagctgaacacatccattgtatacctttctactcaaataacctgaatacgtagcactataggacatatacgtgcgtggctaaacattataaaattataaaatttcatatgactgaagtgcttattagtaaacgacacatgggcccattaaatgacacggggctacggtcaaccgcctgcccataggcaggggtgaaaaaactcagtgcgaatccatgggcctcatggcccgtggcgaggtctatcaatgtctcaccgacatagtacggagattttcatgccatctcacccacatagataaatgtgtcaactatagattctatctcgtaagcgaaaattctagtcccattctgatcactcggtaaagttggcatatagcgtcaatccgatagggatagtagatccactggttcaactatgaccaagcaatatgccaaggcccacgtgtagaagcatgtgataaggtgaacgattggcttgaggaaaaccagctatgcggtaggctttgtgccttcctaagtcgaagtcatcacttcaggtggcgattgtgagtcactcgaccttaccctatttcagctcttatatcccagagagcgcaagaatcaaagtgatattaccagacaaccatgttactgagagatttggacaagcaagcaatcaagaatacccggttggctcctactatgcctcggcaacgacagatcatatttcaaccaatcccggatcgaagtgacagcaattgccttttgggaagtggtgtcctaagttaatgcaatcaaccatattctgctgataagagaacacggctgaaacccgattgaacccgattgggttctagcagtgccgtctgaacaaatttccattgggtgatatccccgcaggagtgctagttcgctcgtagtcgtagtagacaatccggccatccttacaaaatcaaccatcatatgagtgttgatcgacggtagaaaatttgctcgaggatctaggggatagtccaagaggtcctataaacagtctgattcgatattattgcggataccaaagtctttacagtggctgcctggccgaatagtaacatgcccacgtgtcctccgcagcgcggcgggctcgacgaatatatgatttaaaaaaccgtcgaaatagggatatagggaatccggatttcctgataagtgcgtgatatattaggagacgatataaacggataaaggatatgcgcagtcgacttgactaacctgtagctgcagtgacacctagggtaaatggtcttaaacagtctgattcgatattatttcggataccaaagtctttacagtggctgcctggccgaatagtaacatgcccacgtgtcctccgcagcgcggcgggctcgacgaatatatgatttaaaaaaccgtcgaaatagggatatagggaatccggatttcctgataagtgcgtgatatgttaggagacgatatgaacggataaaggatacacgcggtcgacttgactaacctatagctaaagtgacacctagggtaaatagtctttgcaaatagtgcttcagcttgataggaaatgcgtatataagaaccaaccgggtataccacaacacttttgacagcccttatgatatagcttcctatatgcccgaggtgattcttaggtagtgagctcttattggcttacctgtgccccgatcctatcctctcggtttgtacctaagataaccaatgttaaattgtaggctaaaaatgagaagactttgcgtctccttccccttgcaggtagacttgtgctaacagcctgattatctgcggaggtacactcatctgctaggaagcaagacaaaacattagcattcctatatcttttggatttctaggcctaggaagccaccaaatgtcatccgaagataacgaggatcacgcattcgataccagcagcctacgccacttgaagatattcgaaaggttgtatacttagccacaggtatgattcgggtagtagtataggctgatcggggttcaggagttgtatcatatagataaatcgaacaatgacctgatatacagaatcaatagggagaaagaggccgaggtacgcgatacgaaccttctggtaacttatcgtcgatagtagacatgtggaagggacagagagcatgcgacagtatttgtataggggagctaagataaccaatgtcaaattgtaggctaagaatgagaagactttgcgtctccttccccttgcaggtggacttgtgctaacagcctgattgtctgcagaggtacgctcatctgccaggaagcaagacaaaacatcagcattcctgcgcctttttccacttctggaaagacatcaaatgtcatccgcagacaacgaggatcacgcattcgataccagcagcctacgccacttgaaggtatttgaaaggttgcatgcttagccacaggtatgattcgggtagtggtataggctgatcggagttcaggagttgtatcatgtagacaaatcgaacaatgacctgatacacagaatctagggagaaagaggccgaggtacgcgatacgaatattctggtgactcatcgtcgatagtagtcatgtggaagggacagagagcatgcgacagtatttgtataggggagctcgagcagacaagacatttgttcgcgtggtattcgactcgagtgatagaaatgagggtgttctcctgttatacgatccgagtcagtaaggattgacctagttggacgagttgccgtagcgtacctgtccattgaaatcccaaggtgcgcttgagacgggacaatcagtttgcacaatggttatatcggcttcacaactagattacttacagctctcagcaatgcagttaccagccatgccacgtcgcattcaagcttatcgcaatcggctgtcgcttaaaaagccgcgctggggtatataagacgatttgttgagacagtaaatgtgtgttacgaacccacttgcgttaacattgtacttctatggtggatgaatgtgttgcgatgccagaggttcaggactccacaatagtgcgaaggcggtggggacgagggcggaagacgcgatggagcacgctcgtcggccgccaccttggtcttatcttcgatttggcggaataggccactcgccatagtatatttcaccatcgatgatggggtgcccctacaatagtgtgaagatgttagtggtcattaagatgaattggagtaggaattatgctcgaggggcatttatagctgacaattcacacgaggctgctgttatttttaccagtgctttatcacctaggatcgactgcattttcgaagagccagtgaacagttagttcaactattgatgctcgatctcgccagctgctcacctcgaattactcaccgatatacgaaaaggggggggggggagagtaaacgttgtaacatcgttaccgaacctacggaagggaaggtagtttgtaagtgtacttctggcgcattgaatattagatattaagtagacctcgttgaaacttaaccgtgacgttagtttgactgtaaaacagttggaacggagaaaagcagatttagtgcgtttgagtataatatagataccagttgacgttggtaaccgccagtctcgcattatactacggacctactaaacctaggctactaatgcttcttcttagtgaccgcaccaaaagcgtttgataagtgttattatattattctgttttgaataggcctccgtatattattgttatttccaggtcccaacgatctcctcaaaactgccgtcctccttccatgtaccacgagcacgttgacaatggatatggggaaaattcgctcttcgggattctaggggcttaagcgaaaattctatgaattcaaaaatgcttttcttctcagtatctgtcgatcaaagtccctactccttcagttgttcctatacttttactccttaatttgaccacataagagtggggacgcactggagaacctgggggtggggcaatgagcgcgacacaagatttagtgtcgcgctactcctgtttatccgtgttttcgtacgcctactttaaggagacaatgtcaatgagagtttcttgatagagctatttagagtatggaagtgataacgtgaaagaatgtagacaacatgttattttcagctagctcagttcaagagtgaaagtcccttggtcctgcctgcccgaagaaggctccatatggaagagggaactccgtgagagtaacccacttttggtcctaccgttacgattgcggatactacgattagtcatcaccctgaaagtcaatcatcgactaatgtaatttcgtcaacagtaagctggcgaaagagccaaaactaagtccaggaattagtggcaccctgatacaaaaagcgtgtcgcaacgtgtgtcgcaacgtgtatcgcaagggttgcgcgcgtactgcctcggcttttatcacaatgcaccaggggactatttaaattcacaactgtaccataccaaaccatcgcttttcataatagcttagggctgggaataacaacctttatattatcctacaatccttataaatatcaaaaacatgaccttctctatcttcctgcttctccctagcgtttacatacgcgctgccttctgtggcatatatacagttatcgattatgatcgccaatgtatgatatggcctgatagtaactatggctgcacggaacattcagaaccttttgctctccttgatggagatgactgttctggtgagtgatggctctacctatatatttttagtattaacgaagccctagatctcagcaaggttacatatggtatccgtaaggaccactctaaggtcgatatgggtgtattcggcacagtgtgttggcagctcgtgtattactcccgttctgccattatcgtattcatcagtatcgtctgttttagacttgtcttcgtgggggccgtctccatcctccacctctgaatcatctagatagatctcaagctgtactaagtcaggataagagaaccattgggcgactatgttatagttcaaccgccgtccccggctcttgaattgacccattatcccctctcctcttttgttctgggttttgcctaccggtgtttccatatcactagcgtgaatgcgaaagaggctttcttgagttgtgcttctttacgaatattaggttttcttttgccgagtaacctcatttgttaaaaccagtttatctatttgtatgtacttgtttggtgtaaaacgctgatttggtagcttttcggattggataatacagcgtggatggacggataaatgaatggatggatgatttcatttaccttggcccttcaggaacgatatttattcctacgatcatgtggcaagaatgtaagccgagatagaccaggttacatcgatccctgacgagtgaaataagtgtagattgcaaatgatgtaagagaagtattctgacattcattacaccaaatcaccttgcatttgatgggtataatatgtacttgtcaaatccttcgggaactagaggtctattttcctttgaatgttaacgcagtatgggcaagattgactatagccctgaccttttctaccgtgagcagggtctaggtatcgtgaaacttctcctaacacgaagggcgattgagtatcaagtctcctagcgaatctctgcatcttgtttgacaaaaatgttggcattattacgtgcaagatagtgactatgtggtcatatttgcatacgagtcgagctacaatgaggagaatgaggagtattttaagataatgcaaatatatgctacggacggggccaagccgctgaaggccctacatgacatatcctgccaggggattggggaaccttgtgcaaattgcaagcacaaagtacgctgtgaaaacctggccaggtgctatgaccctgtgcctacctatatgccatctttatcgctgccattagtggaaggtctggtgtcggtcgacgtgcttctgtgcgaaagagggccaaaagctgtacaagatcatgtggttgccaccattcaagcaggaaaagcagatataactgatcatggcagcgagaaccatctacgtgtacaatacatgtacaagttcgcttcggttaacaatatctctataggatcgaaccattcttctgcagaacctcatccagaggttccgcaaaatgatctgactccattaatatcagtctcgcacgcatatgtgaagggataatccgtactcctttcatccgtatgtgggataaatagacgcattgggatatcggaaatcttcagccttcgaagtctcttatatgccgatgcggaggttttgactattagagagcaaccaaacgatccaacccggttcataaaacagattgagtgtacggaaaggggacatcacatatgaaatacttggctatccccgggatgacattggtagcttatgcaatgacgtactcgatactggaaagctactcaagattgattgtgtgtatagcatctaactgtgctcatgttttaggtgattgccacacggtcgaggctgagccaaatcgcgtaccccggtatatggtttctaatcatacgaaaacggcgacagggataaataaatctatgttaacccacaatacattctcgatatctggtcgagcggcggccctatcgagtcgggtatcgattcgatgctgatcacatcgcgaaatggtctggcggcacggaatctggttggttgggggagaggggtcatgtgatcgctgttcagccaatgaacgaggaagagtccgccctattgcggacaaggatcccggctccccactctggagaggacgagaaggcactggagcaggcactggagtaaattccgctggcaattacccaggcggggtcctatattgcgaatcgatttcctcaggtcacggtcccccggtgccttcagttgttccgtgagagcgagtcgaatcaggcatatcttcttcagcacgaggacgctaaggacctccagcgggaacctatcattcggcatgcggtgaccacaacgtggcagctatccttcgaacaaatccaccatgaccggtcggcggcggcggcggatttactggtgttaatgaacatgtttgatccggcaggggatcccagaaggcctcgtccgtgccgatggtaataggctccagtttgaagatgcaatggcaccatcgatcaattattctcttgttcatatcggaagtgaaacagtgtcatttgatatgcaccgacttgtacagttgtcggtccgcacctggcaagagattcacctcgagctggcgcgatggcaagagaaggcacgagcgaccatggcagagatgtctcccaatggggagtacgagagctggactgaatgtaaaaggctgcttccacatgcgcaagagggggtaaaacctagtttcaacactgatgaggatgattccatgaatgatgccacgattttatctacctgtggatggtatttacatcgccaaggtgcttattttgacgcagaagcgatgcgtcgacgggcatttgtacgacgagcgaagatgattgggccggagcatccttacacgctcgccagtgccaatcagttaggcttagtgcttgacagtcaagagaaatatgaggaggcagaagcaatgtaccgacaaggactggaggtccgagagaagcttcttgggccagagaaccttgacacgatcaatagtgtcaataacattggccatctgctacgcaagcaagggaaatttgcaatggctgaagcgatgtatcgacgagcatcatgttacggccaacagtgtcaataatgttagcttagctcttggtagccaaggaaaatcgaaagaggccgaagcgatgcaccgacgagtatcgggagtatttaagaatctgtttggacgtgagcatccccttacgcttacgagtttcagtaatctcggggatactctcgacagccaaggcaagtatgaagtggcggaagtgctgcatagacaaacactagaagcacgagagaagatgcttgggtctgagaatccggacaggcttgttaatatcaatactctcggcaacgtgctcctcgctcaagggaaatatggagaagcgggaacaatgcatcgacgggcactagaagtgcgacagaaggtgcttgaatgtgagcatcccgatacgctcactggtgtcagataccttggcaatgtgctgtccaggcaggagaaatacggagaggcaggaaagaggtatcgacgggcactagaaggatatgaagagatacttggtcgtatgcatcctgacacgctcacagtaacattcgctacgtgcgctccaagcatgggaaatacgaagaggcggaagcgatgcatcggcgggtactacaatagaatgacatagagagacgtctggacgtgaacatcctgttgtgatatgaggttggtgcaggtcaggaagcgagccgcaccatcggaattagctccgagatgtctatacagacaaccaagttgatttccaatcaacttggactttgtggcgtatatatagcctcatgcttccctctaagtaaataagcaattgatatacctcttgaattacaacaccgacaacgggaactttgccaaaggcgctgtatgtaaactgtggacctaaatcaaagtcgcggataattagaacaaaaagaaatctcagtctcaatgcgagcgaacaagagaatttctttgagaggttgtcaagcggacgaagtccctcagctcaccagtggaggaagggtgctagacaggagcttcggagtaacagatgtgtaagctatgcagaaacttcattgcgcagagatcagagcagacccttgggcgtatcaacgactaggttattttcacagccgggattataaaacgactattccatctcactttcacgataagcaagcttacgccttatatgctgtgttcttttatggcgggtaacgtgtcagacttccgtgacgtagcttcccgacacacggccattttccagtaccccaagcagatttagctccaccaaggaccctcctagtgacaagtcatattatgaactgccccggatgaagaaaatgggagattccgcgcccctatacgtctacaagattgtcccttctacaaaccctgttcgagaaccgcttcccgagcgattaccagtcagccatatcgatcaatcttcagggttcattcaccttttaacagctccgcaagtaccaattgctctcaaagctatttttgaaagtgagccaatggtatatgtcttccggatcccgtacaataaagttatgcaagacattcgttgggagacagcggacggtgcattgcgcgaggctctgcccgaagaggatttgtgtccagtaagtatctgccggcgtatccaaccttgggacttaagactttgtttgatcccgtgtggcagaatgtgagctcaccaatggagtagcatttgtacaataagttcaacctaggccgagacgatgtcgagagcatcgctgtgtggataaacgagaacgggtgggaaaaggttctatcgcagactggcacgtggcttttatattgagggtagcctttccgcctatcttgttaatgtgcttatttgacaaccatccaattgagttgcccttggatgaactgaaactgttccacaaatcaactgcctcatccttcctttaacctcgcaaaaagggcttcagtgtcacccaagtgaaaatcacacatcttgaagcagtgggcatcaccactcagctagactagcaggagcttatctgccaaaatgatctttaccctacaccgcatcgccggtcggcacgactgaatgcccatcgattgtagatggtcacggttctctgcacggatgtgacaagatggagttggtatagagaagtgataatcatccaatctcctgtgacgttgatcagactaagaagcccgagtagtttgcgagggaagcagcttaatccatagccgggatcaagggaagaagcaagtgcggcgggcatacttattacgatattggtctgttgattcaaatatatccaccaaatactctggagctcggaacaaggcattctgcgggtcgtagaggtttttcgtcacatgtgttagtcaactaattagtccctattattgtgatatcttggatacgtcgctgttaacccactgcaaatcccagtggcagttgtcgactgcccaagcagtcgatgcgtgaaatgagggatatctctttcgatcagatcttagctaaggagctaattagaactgcatggtgctgtgccagcataaatctgccaagggtttcctatttcggctggataaaatgctaggttggcatgccaggataccttttttactactgtatccgcaatctaatcacatatctgtatcaattcatttattttatattagacccatccaaataaaatggcaatatcagtgttgtatatactcgaaaatccaatagaatatttcggctgcagtagtactgaagcgaggcttagtttagatgtcggataataagccaataaagatcgagtattcctagtttacatcccgtgattatgatctacaactcttatagtacttattcccatataccaatactctccctatttgccgccggttgcttggcacgctcctccaatataaacgggcctttttttcactcctttactatactatcgcttccttcgttatttttgaattagactagcaggctacaataatgcagcatgaaggagctatcttgatctactgagatgaaatgttcggggtgagaatcaaataagtggatttgtctaacctaggtaaacccccgaaaaaagaatgctcttttaaatacatgcttgggacccggtttactatgcctacggcacatagacctctgtcgatcaggggcaatcgacacgtgtggtgattcctattggcttatccacatgggacaacaaccaggtcagaattatggaggtttgcgatgcacctcaggaattgaattcccgagagaatataattaaggacaattctcaacattaatgagtcgtcaagccattggttcattaactaccccacacccaaagccgaatcttcacctcaaataatccacgaaccatgatcaacggcgaccaatattctgacgtatccgcaggggaacagctcactcctacgacatgggtcggaaatgaacgccgcaacgtctttgaagacgtcgttgcagatgagaacgtgttccaatttattggctctacaaaggggcatacaacgaccgcaagatcagtcatagccaagacgtaggcgacccaatgtctaggagatgcgtccgaaactacaatccagcaaatttcaaaggaccgcatcggaatcgcggcgaatattcaacctcctcatcgccaaccgcaaacaaaacctttcgacgggcccggtcgcacagtaggttagcaatgccgggtattttacctcgaaattctatatcttcatcatggatactctgatcagaatcgtcttaagattaaaagtacacaagggagggaagggggaggaaggaaggaagcgttagcgggggtattgatagttaagataaatgatataaatgggatgagatcgtcatgacgagattaaaaaagggggggatgggagctaatgagattatgcaggttccaagtctacgtgggcattggaatagataggagaaagggcgagagcggataacggccgagtctcctcttctcccctgcctacaacatataggccgaatctagaatttgatgtgcatggatatgcatgtaacctggaacctatactagaaagggtgaaatgatccgtgtacttcgtaactttcttatctttgctaaaattaagttcctagtatggatggcgtaaactatctccaactggcatggcgagtcatccagaagtatagtctcataatcttataggcttgctatataattgttcaatttattacttaagccacatagggagctagatgtagatattctgcgtgagtaacactcttcaaggcttgagaagcagcggggtatctataatacgttacacgcttacacagaagcaatgtcggttttcctcaggctattcgattcctagaagcggcttttgtgttccattggcagaataaccatgtcaacagatgcagttatccgttagcaacaaagtagtgagcaccctccgccacatctactacctttccgggcttccacgcctcattttgtcattcttcaaatattatcatcccgccgcaaacactatgtaccagtgtcatgataatcagtacagatccaaacgtggcttcatcaacagctccatagtacatgactgcacagtatgggagcctgtcaaaaagctcagaggcaaatcaagatcggtgagcgctgctagcgatagagcctgcaaaaaagtcgatggctaagctaagaaccacttggatgcagccgtaacagattcgagcgttacggtcctcttgtagcaatcgcagggagaccaagaagactgtggtcacaaaaaaagagccccggaggccattcctaattatggtaaaatcccgaatatatggtgtgcttatagtttagctttgacctacgctacgctagcacttcccacagtcatcgcagtaccccccaactgtacagccccgttgacaattataaggccactccctcctgtaccagcactctgccctacggacatcgcgctcccagctgcaatatttccgatccaactataaacggcagcggctgcagaacctatacttcgtaaagaagggtcattcgagcttcggggcgcgggaaacaggactcattttatttctcctacaaggttgcacatacccgcctggatgccgcctactgtgaatcctatactcgatataattagggctgttgcgaggccaggggcagcgagaacaacagtaccagtagtgccgacgaccgcgcaggtggctagaatagggttctaagcaccccagctggctgcctggcatatttaagcactagagattagatccttcccggtacatggaagttgtatatgaacctgagtcgccaagttggcggactttacaagggcaggcttgccgtaggttacgacaatttctccgcctttctaccccgcgtgcacaattctagcgcctccggagatgacatcccctggagaaacatttcggaaagtcatggctgaggtgggcaattactggactattcggggggacgaagctgtgatcgtaatcagggaaagatgaagttactggagttaccagaggtgcctgcctatgacgcaagggattcctctcgggcctacgtaaccccggtaaccccggaccaagtacagggattctaactactattcttagtagtaaaatacaacataagtaacagcaaagtagcgaggtgctgcgatgtacgtacttcggctatttgctggtaagtgcgaaaagaaattattagctttcgtcccccaatatcggaacttcaaatcctcgtgtaacaaccgtagtcatggaccgagtatatctaagacactcgctggccaatgcatagacgtcacttatccttaactcacgcgaaattgatggaattaccccgagacgcctctgaaaacctaccattggaacccctcaacatgcggagaaatcacctgcgcctcagtccgcttatgaacgaccccctcactcctttgctggccatgtacgacccgttgtctccttgttcgcgtggtcgtttcctaccatactcaaagataccagtcaccttatctgacggattgaaggggccgtgggagggtaagggactgggcgccataagctcggcgacgagtcggccggcgaaggtaagataaggcttgtatgggacttttctccgtcaaattgtaggccatttcatggggcttgttgtaaccctcggcttcctaagcctatttagtagctcgggggtgatttacgtctcgtaacaaaatatgtattcccagtctaatacgttggtcacgagaagaggaagcgaatcagctggggcacgatagatatatgaagaaacgaacaggccagaaacatacggtgtaaatttttggttttgacaaatggagcttgcgctcctgtagctgcgtaagagccaataagtgatagagaaaatacggatcttcggtccatttctttagggttgtctgagctagtcgctcctggcagatactcgctccaacggagtttataactcccattggtcctggataaggctcaaactgtctccttcgatctccgttgacgcttgtgtgatgtatatagcctactaaccagggggagctattatggatgtgatcgatggttactttatgacgataaaacacaatatagcctggttagttaacaggtcgaccttgaaaataaaatggcgctccttactgcttagtagggttgttagtaactcctatggaagctgtcctgtcagacagtagcttgtacctagagtaggaaaaatgacgctccttacttactaaaatgttgatgagacgacgacgctttataatagggaataggttcatagtaactagttcagtatcgtttgatgacttccggtaaggctttcgacgatcattgttcctgtggtcgttttgagtagattctgcacagatagggggagttccgatatcctcgaatctacaccccaccaaattaaggtggtaagaagtctactgcagaagattaatgagggaatcacggtagtagagcacgatatcacgaaacgattttggctgaggattggccgctataatatagataacaatcgcgatgatctttgcgatatcggcattattataataatgcctaatcaagatttccactgcctatcgggcacctctgcccttctttgatatatgaccgaccaatcaccttataatactgggagagttggacgcaaactgtaaaccagactatgctgctagttaggccagtaacgaccgcgaattaatacagtagttagtctagatagggaaatcactaatgtaactattttcatacttcaactatattaattatagctgtgtgttcctaacagaactcctaaaatagagaaataggtctgagaggttgtttaagttttaccactaatacatttgccatacaatcgctcatcttataaaatacctatatgtatacactactgtgaaatagaaagataattcttatcgctttatatgaggtatctacgttatccgcaggagaatgtcaagggtttaggcaatagctgagccgctaggcctctatagtcgccagtcacaagagaatgaacgtagctttacctcgagaacgaccatattattgagagctttggcttaggaatatctaatcggctccttatataggaggcgtcgcaactttataaatagttctccgtcagtaaatacaatttgtgatctcccaatctctagtagaagtccacttttagaaaagagttccagataattagatagaacggccaatctatagattctgcattaagctttctgcgagtaggaaagtccgatcagatcttaaaataaccatttttataccagtaaaactaccattggatgtgattctagacttgttgtaggactatcaaacaatgttcacggcaagattacagccgtctaatattaatactaggaatactatttactatttatcactgctataagggcaagtcatgaaataacacgactaccagctagcagggcacgaaaccattatcgacgaggtcactggctgggtgacattgaattgaagaaagctgggagtcatttgtggggactggcttggtactagatatacgaaataaatcgctttgcttatatattatttgtcagttaaaggatagaattacttagaaatcattcgggcaccgtaactgaatagttcctagccgaaggtagaatctgacctatactaggcctagatatgatagatcactctagacccatttaacggtagactggtttatgcgagttgtggatataaataataggctcgaggtatatacccacgctacccctatccctactcgggtctatatgactagtgttattattcagctcttataatcacttcgctatatgttaccctcaactccaatcaaacgtaaattcgcttcgcaaaacaggctgcacttgttctatatatctgtgtcagggaagtaggcatgatgtactcctaaagtgtaatgttaacagtatactatcatattatctcccttcgggtgttggctgtcgattctatctcgggcagtggcgtaaaaagctcctgcggcgctggctgaggctttatataggagctgccgtctggtacttgatcccgacttccagttatctcttatagtgatgactgtagtcgccgttggaaaaggacgaacgcaagtgcagatagtaccgctagtccggcgacgcttatgccgataccggtccctactttcgcgccagtcaagagtgcgctagtatcagatgatgcggtctccgaggttggagtacttgtcggggtagttgaggacattgggataaatgaggtcgctgaggtagatatggatatcgtcttattagatttcatgtagaaccccggggagtataaacgagggttagaaggagtaaagcttttcctagttggtttaaaagtgagcctatacttgttggtatctgatagcgcttccttattaatagcgactttctagacaaaagtccctgagtacgaaacatctattgtactagctattctgtaatattgtcagtctagtatcttatggtttttgtttagggatcatatactcgaaatctttttagactatatggagaaataggtgttctatacattcatctacagatcgctttactcgtgccgttcatatcacgattcaggatagaagaatcctaacagaccagtcaatggttaacgtagacccgatgtaataggtagtaacgaagtcttcattgtttccgctcggcgttctccaaatagttcgggttggcgcactttatgctacccgggatactgagatcatgagcagccatacctacgctatattggccatgaagtatagcagaaatgggagctcaccgttatcctataatgaataaaatgatgttgtttcaaacctaagaattcgagagagggaaagcggagggaccaggtcttggggaggtttattttaggagtcggaatagtaaacattcccctaagtcccaacccttacgaggtgcgagacaactagtcatttctatgtatggcctataaataatgctaagttaagtgtgcactagcaattagttgggaactagcaaccgaccaatatataataatgaatatgactacgaatgaccttttattttcctgtttaatctacggtttagatatgacgctattctcattcttatcttaagctcaggaactatgcgtattataggaccggtctttttgtgcgccaagaataaactgcatcccttaactgtcgggatctgccgtttaccgtattccgtcatattttcggccctcgaattgcgtccctcaagcttgcgagtcgtgtttttctgccaataggctccgtcctagctctactgagataaatccgtgtctccttgtgccaccgtttagacaaggtaaaagaaaaacttaactagcatttttggcgctaaatcattttccaaatcaagcagagcagctagtagcttctggctaagctctaatagcgtctagcacttgtaaagaagaaatggctgtgttatactctgggacgattaggactttatttcttactaagcttacttcgaaaatattaccgctatatcctctgttactgaccacagtgccaagtatctaactacattctatcacgagtaagtggtagtcgcttatcctattttctatcttactgcgcctgtaacctgtgatatctccttttcaccgtaattatttctagtaacagctacttttgcctttagatactcagtgagagagactagtaagagtataagggacgctgagttagtcaagaaacgttggctaactgttgaatccttcacggctctcttaattggggccctgagggagatattctatccacaatgacaggcctatatttcttgtctaggtcacctcgtctgtgagcgatttaacgttgaattatcgaaaagcgactacaattttatccctagaagtcgtggtctttttgcctagccccgctttagtgttatgttggttgcgttgagctgtgtgggtctgtctatctagactgtagaaagcgaggttacggtaggatatacaggtactcgacccgttaatctgttaaggcttagccatacatcgttaacacttatttaccgacagacctatagcttaacgcagctagcactaaagcgaggttaggaagacagtggccatgatttttactaatgaaatgttagacactctttggtcatttaacgttaggccgttagcagatgagatgtttaaatcataaaacctgggcgtgccattcttaatcaaatagctcccagtctacagtaagaccgcaagttaaatactatggaggattctataagccagccaaagtttcttaaccgatattcttaatacgaccctagctctttctaggtacgtatctaaaatggcattaagaaggttgccgccaatagttgtggtaaaaacgaagacaagtttcgataggcctctattagataggtatcattcgatgcttactaccaatcagagcacatacgtgacacgatgagccgggaagtctataaataagtcctttccttacagcaatttgctctataacttaatcactcggctgcacaaagtcgagcaggccttatacctgaaggcgcttgatgagttattcccgtttgaaccagcactggtttttccactctgctgacatttgtagaatatatctgggagtagcaagccggacagtatctgtgagatatagttcctagcagatctactggattaattcactattatacagatatgatttacactttagttgagtggaaatttctgacctaggttcggatttaaccgcaactctataccaccctcgcttaagcagataagtagatttcccctcagtaatcagtcaaatgtaggcctctttattaacaggtgcattatcgaatttttcgcctcgaaaattggctttgtcaataagcttcatttactgagtgacccttctgactattattctgttctatgcgaaaggttagctttttgaccgccttacctaggaatgttactgtcttcagtagccggcatgaatatagatggaatgaataccttagtgatacatacgaaacgatcaaacctaggagtatatgtaacctcaaaggctcgtataaaaaatgtctcatttatttcgccgcgataggagattgcaccgagcttcttcaaagcctattgggcctcggagctccatttagctatcgtgattagaataaacgaacgtgcaaaacgtgcaaaacgcgcaagtgtgctaaatcgattgagattcctctaagaatgagaatgaggttaccaagatcgacttatggccaagtaaaggccaggaatatctttattaagctttccactgttattatcggccttaaagctctagcagcacagatagttatacgcagtctttctagacctaaggctgccagaattcgcggtctaagaaagccttactccaaactatagataatggtctatatgagagaagatttgggatttgcatgtatagtgccttataggccataaaataggctctagtttactgtataatgggtaacctcttcattctcagcctctttatcctcagcgcctagactattactggctttttccctgctccagctcccttacggccttattatatatatggtatagggcctatgaataattgcgcagccttttaagtttatagataaggttttcccgattgtgtttaagcagtgataccagctccttggtctcacgaagtgaacagtagaaacgtgctcttccctaatgaagcgaagctataccaacttagtaaggatatttacgcttttgtatagtagacttacgatggtatccgtaaccgggaccgggcgtaagggcagtggatgatacgctgtctttattagtggttattatgcagatttcctttatggtatactaacagtcggaactcatatgggttttatatatcatggatgggactgcgcttggatatttatacctagaccgagtagctatagaatatcggggagtcgatatgcctctaagtctgctcctaggattgaagtcgtgcctcccaggacctagaattggccttgtcagggatatacgtaagcgtcctcgctgagatagaaattcctggattaatcaatcatgccaattacttagttttggattgttgtacgagtattatgtaactattttaaattacgtataagatctactgttcgatttacttatttcttcgtattggcacgggaggtgaacataattcggtctatctactacaataaggaagctgatcacggctcgaaataatactggtcacaatatatgattgcccacaaccattatcgaccgtatcttcgacctcaatgtatttacgatccgagcagggagcccatgttagggatagtgtaatttcgaaattggccaggccatttggaaatgggttcaaaatatcggtttcaatttcagatttgatctgcaaactttaccccaggttaagttagcttggcctaattggaccagttcggattccaattcaatgctagccaaaatttgtgaaattttcatacacttgaaatttcaccaaccatccctactggatgttgatatagcaaacaagccaaaaagacggatgcctgctcgtttgaagattggcgggacagagagcaaaccacccttagtaggcgcagaccttttattaagagcgaggggtcacatttgaatggtagtagcttcttcgacgcattagattatatctaacatcatcggtagcgcaaagctatcaaattgcgcgggttgctggctgcattaagcgtgctatcccgagtcaaagcagaccgaaagtaatctctttttagttctacaacctgccgggtcggttgtgtgagaacaaagccttcgggtggccattccgtgccaaactcattcttgagggcacttgagggaccacactgcgtggacgagtaacaaaatttcgttactcgtgagtcccatcgactgtactggatggatgtaacaactgcataattgaagccgcttatcgcctggagaatgtccggatcctcgatcttcacggctcgggccaacctaggggtatctgtcaaatttcaagacaccaagatcggccatcaaaagttgaccactctctccagagagccatttggcttgtcaactttgcagtcaaagctctgtgatattgctagagtcttcctctgcgcaagatggcaccggcaacggcaggccgaccaagttggccagcggtggtatgaagcagccatccgcaactaggcgcaagtgccgcatggctctagagttgccgctccatccattgcgcatctgggccagcgtcagatgtcatcagtctccaggagtcgccctgcatcaggcaacaccgacaggtcacctcacgggctcagacaagatccaccggtgcggctgtcaaccaaccctgagccagtgcaaccattcaatccatttgtgacttccacaatgctgcggacaaacagtgttccatggcatgtttcgccggctcaaccagcgatcctgacatcggtcgctaacgtctgggctggcgtctaaagcttgacgctcaaggatctcaccctgagtgacgagttcgacgacatccactgtgtattttgtctggccgaggatgatgaccttgcaaatgagagtgtgatcttgcgctgtcagtgcaaggcgctttcccacctggcctgcgcggaagagtggctggaaaaacgaactacgggttttgggacgtcatgctgtgtgtggtaagtaggggggctggttccaggtatgcaatacccaagatgctgattaatacagtcgaaatgaagggcctttagacgctttgattcgcccaatacgagtccaatcgtcggatgctgagacacgtcatatccacacggcaactgaatcatctgccgatagagaacttgccactatcaggaattcatcaccaaatgacccgagtcagagccagccgcgtcagcggtcagtgggaccccaagtgggatcagttgagcagagcgtggagaatgggcccccgtcgctcggctaggctagtaggggcccatctaccaccaggcccttctacgtctgcaccgccccgccggtcagcacgactaaattccactcgaaggtgatcttagtttacagcgaaggtgtgacgggaatgagaaattagcgaagcgactgtttcacgcgtgaagacacgtgaccagacacaccgcattcggcccagcaacaaagagcatagccgtggtatggagttttataacaagtttagaaatgatacaaatgaagttctggatgttcaaactcgcagagcaccaaaactaaaaccgcgcgaccttttcatctttgcaagtactagatgccaatgcacccccaagaactgttggcagtttcgcttaattttgggatatttttttagaccgaaaccatattcatacccaacggtggtggccaaagaactgtagacatggtttatctcagtggtgcgtgtcgcgtcaagacggagactgttggcagaagataacacatctcgggccggcgaaggaacctggcaaactccgatgctggttatattgactctgggaatcaatatgttgaccctgggaaactcaaaagcatttctaggagctgtatatcccctgggaaatacaccttagctcctggggcttttaccaatctccaggaaaattaagatctacccctgggatctttgctctacgttcctgactgaatacacactggctctgggaacacattggttagatctgggacctgttgggctcctaggaccctacttctggatcctagagtcaatattttgctttttgaggtcgcggaacgctctcacaagacacccacaccagacctccgcacaaacctgagacattcgaccactcccagaaggcttagtcatagccccaggaaccgcacctgaggttccaggagtgggtgaagctgccaacaggaacatgactttaattcctcgaagtgggggtaaaaggccccagaagctacgtcgggcttcctggggtctatttgacccctaggagctgcttatatgctcccagaaaccgcactaaaggttccgggagcgagagaactcccagggccaagacatgcgttcccggggctgataaagctgccaacaggaacgtaactgattttgtgagtggggatggagagtgtacaagttacgcacgattttctggggccatatgattattgggctcacatgttccaaggtcaatttctgaagagtttacggcaatcaaggtagatggatgtttatgcagagcacatcgtcagccatcatctgtcttttacatcaagccactcagaatactgctccaatgttggccaatatcggccggctagtcaggtcaagcgacgaacatcctttgattccaattaggaaattcaacatctaagtcatctccgcaactcagaagtgtgtctattcctttccaacaccctatccgtcgcgcctctaatgtctatgggctccaccgtcattcttcgaaaatcatcatataatttagcaattgttcttgttcgtaatacctgctgaaccgttcttcataaccctactcctgtaggccgttggaaccttcacatttactgtgttgtaggctcggtgcgcgtactttgctagtgaccacgtaagtcgagtacgacacaacgcacaaacgacaaagtgaccagtaaatatcccggaagcggcctggccaatggatccataataaataagcttgtaatatgggatgtggtccctgtcaaggagctcaaaggatgcctgaaatacgtgaacgcggcaatccaagcccctaaggagagcacgatcatgctcacgacgatttaaatgcaaccgtagtaaaaccgagcggcgcatttctcttgtagccacttcggatagaccacgaggattaacccaaagatggaagatagggctgaaactagggccgcaatcactgtgccgtcgacgacgtcgtccatgagagtttggaatgtgatgtccaaaatagagtcgctcagtctcacgaggtcggatttgcacggtctcgcaggacgaccgccaagtgtacagtggacgaactgagactggcacgggccagccaggtgatggtaaggaaaaccatacgaggcgcattcgaatcatggcggtggcagtgctcgcaaggacgggtttattgagtgtaaagaattgaggcaggtgctgctcaagggaaaaaaaaaagtaaagagcgggaggtataaagatgaagaaggtcattatccccaggcactgtaaaacttatatgtgatcttcacgcaagtctgcctttccaaagaatgacccagctgatactgagctccgccacaggcgttttgattacctggtgccttagtggcagccaaaataggctttgactagataaaaaatgttccaagttgaagcactactcctatgcgtaaggcagatggcccccacagaagtgtctgatctctcagtacgggtcccgggaaatcacccgtttgttccttgtatttactttcctgatactatattattaacctccttaatatgtgtcgtgtttacgcgtgacatctttcaaatttgaacgtctgataccgacgtagtttgccttggtctgtttgcgatatatcactctgctgtactcgaggaaactgcggtttgctgttgattgcaagcctacccaatagtccccagaaagatgtagtcatctcttttctatcctcttttgttgagcttgtgcttaacagccagtgtaggatgcgcctctaagccatggcaaaccgtcgctgttaggtgaaccaacgcggccgattaggaaacgggcttcgagtgggaaacttaatcaagtcccaatattggcaaagaaacaatatggcttaggtggatatcttctacaggcggaaaactcacatgctcctggtgttcaacggtgttttatgttcaacgttgatgtgaacgttgattcaactttctgacatcattcaccacccgtatatcgcccaaggtgctggaatgagaacactcaaaaaatactatcaggtcggcacagtaccaacaaattatgacaaagaagttaaagtctccagagctcctggaagctcaaaacagaccctcggccggtcggatctttatcgtggcagcgcggcgcggctgaaccatcgccctctaacaacccccaagtcgtgagaaatgggactcccttccacacgccctatgagcaacaataatttggcagccatgttcctcctgggaatatgccctaaataaattggaggctcgagcatcatgtggatacagcaactggattaaaatatccttgattcgatcgtgcgtgtacgtaccactattgtggccatatattgacatccatagtcctcctaggagccggcgctgataataataacccgcaaaaccttgactgtgggtggtgggcatgactgcttcagccccaaatatttaaaaggttgtaattgtcctcacggttgatgatttcttgtctatcttttgctccaataagttgctagtacaacaccatcaccaacgaagccaattaatcatggatcacaacctatcacaggttccaaagaagtccaataccccagacacagaaggccataatggacgtatatgccaaactggtatagttattttagatccccttctcgaggaatccatcgactaatatacctatttcatgaaggcaatgaattggctgaaaacttccgtcgtgtcaatggtctatttatccacgggaatcgcagccatataagccaggttttacaaccgcctattggccaatctactggccctgtagctatagaggcagttacttccgttggtacctctcttagtagcttaagggcctctatgttatctctaagcgttataagggctaaaaactaagacctaccccttctgaacgtaaaaaagagagcagccgaatcctcaaccctcccacaaaagcgacgccgggattcgtactctacctctcaattaccgggccacctacaactggcgtatcaaaagagacccctatgccttataaaaattagtaggaaaatggtcaataatacacttcaatacctacaaatgctatccgaccgtatcttgatctacgataccatttcccctagggagtgggctactatgcatctcaccacccaattgctatagagcaggtacgaagagatcatcgtaaggaaagagatggaaacagacgctgtgcccgattttgatttaccactaacacagccagaagagaagtgccggaagtgtactgctgcagacgaggagcggctgtatgactgagacgcaccccgttatttttaccttatcggctatattttgatagtataaccggtcatttgaacttaaggagcaattatagtgttatataaccattaatcggtacttgagaacctgttgagctccaaatccatcagtatataactaagggacttttaggtacgaaggatttgaacggtttcctgtgcgatgttagtacgcttagtaagcagaaagaaatatgcaaaaccagctgtatcttgatctccaattaatacaatatattagagaaatcagatagcgcgtgcgaggccaatcggggatagcaatgaagaaatagcaattttgtaagttaaattgcctcgaatatcaaaatcagccacttcttatattattcaacccacttccttcgtaatagtgcaatggctccgtgccctacaagtatcgaaatatttgtgttattccgttaatcagctcttgactgctggtcctgataactcgacagtttggcagtcattttgagtctaaatgtcagcatattaatccaagtgactcaatatggcatcagttgtagactatattaaactgtagtattggtaagacaggtaattctagaacgccgaggcccaaatcagctgtgccagtattcgtccgagaattgtgagagagcgactcgccctactgaaaagcgagcttccaagccacaggcatacctagccataaataagtcgaccggattatctatcttcacctggccaacatggtcgttgcagcgtcaactagatgctggtcgcatggaagttgcgagtgatcattacatggccatgtaaatgaactctgtgcaacgcaataattactggcaagtttgccacttcatgggcctaccaattattgtaataaccataccatgtctgatccgatacgctcgttgactcaggagtgaaccatgaggccgccattacaaagaagctgccgcagactctgactcgcttgatagcttccgtctctttatttttggcgcgttggcggtcataggaaacctaaaatttgtccgtggacctcctgtatgaaccagcaacagacttgattatcaaagggcgcttttcttcctgctgctttgcagctgagtacccacatacccgattttgggcttgcctcgtacattctataagctgtatataccatgtcgagaggtgtcagcctgcatgctcactcaaattttgttatcgtggtatagttctgtgatttaacacgttgctggtgctgattgttggaaattgtgcggaaatgctgatatgatggggcctaatagcaacctatggcttaatacttactataactagcccgttccttatctataaaggatccctatacgatactctacgggtagtatgcccctaaacacggctagtaccctatacccggctagtacccgtccgaccacagacgcggagttgctcaaacccatggtttcggtttcgggaaagttggcggtgaagccagcgtgtgaacgactgcggtcccatggagtgtttctgtccaccgtggagtttctagttgggtcaattgatcaattgaccaccctcaaaatgacactggactgtggtgcaccagtcacttttgttcctgcgatcttgctatcttaggagccattttcatcattgcaaatgccaaggaggggtgtaccgtacgagcagagtgctgaagctgcctggataactcggttcaaattgacagaatatacagagtgataaataaaaacataaagcagggctagctactgctctggccaagaaagtggctgggaagtcagaagatatcatttggtaggaaaatgcggagggctggttaggtaaattatactttttattacgtgaaaggattatagtaataaacaggcagttaagtggtggcagggagagtggagtgtagatttgacgaaatgaatattctgcttagctgaggttcgaagtaaagattgtttgtagttactcgttaggcacaagatcacaattctctgaaataaataaactaaattgtgaggccagaccggttggctaaacttgaaatacgattagttgcatagaaatcaatcaactaggttgagtacccgggtcactgatgagcggctggcttagtgacttgaattcaagtcgtccatagtatcagggttacgtgataaaagaaaatatcaatgactcttgaaatcatcgacataatatctcggttgttagaaattttttctcatatgccatgcaaaatctggtagatcactttcttgaattgcaggcttaaacgcgacgacattttctttttgagacgattgaatacttgaccgcaggaatcgcgttcggtatatatattaccctgcctcttttcggaaaacgattaacccataattgaagagagcaaaccaaaatccattgcagatcgttgcccggcagatgtttagttcgacctgaatccacatttcctggcaagatttctcatgcataaggcgaggaggaaatcaataaccagcgccgatatgctggagagaaggtgtattaaacgagtctacagcataagccacaagagaaggatgaattactgagtctgaaacatatgtttagcggcatatgatagccgtcatcgtaacggacaatcaaatcaactactggaacgaccaatgtgacggcactgatttcccaaaaaacttgacttcgtgcagtgaaatttatattcgacagttagcaatggtgttgtgggattcgcaaggatgacatgatgggcatggggtgctcgagggttgtggagagagtcagttgggcggcaaacatcggtaccgatacatccgaaatagctgggaagaatgtgttttgtcaacctgaggattcggtgtatttactagcaatcgggtttctcttcaccgacaacgtacatcggaaattggctagtgttcggatttgaccaccatattacaccaaggcaggatctaaagctttcatggcagtaacagaatttttggaaagtttaaaacaggcgtggtgttcaacgggcccgaaaggggccgtatgaaatgccaagcacgtaatcagatcgtgcgatacttaaactcaaagaagcagaccaccaatgtataattatctgaggagaaagcacaatcgattgtaatatatttatcatattcttcggcccgttcattaaaattatacacaatcttcagatattgagttgcttctcttaatgaagtcctatggtagtagaactctagcggtaagagatgccgtaacccgcaatgtcaccaaagtggccaatggtgggtacacaatcacttgtctcgctttcgccgagcagctcctcgtgtaagggatccaattcagcccacgcgttggcatatttcatccccttgagcctttccttctcgatgacttgaccgatctcaatggccccattctcatttatattgttcatggtagcttcaacgcttctcggtcgaaggccctgatgttgggcgggaaggtatcccatctttctactttcgccaagtagacccgaagctctcagaagtcgttccggcgcgacggtcaatcttccctttttgaatacatatttggagaccgaagttgcaaaaataacgggtcgcgctggcttgtccctgctattctcactttcagccctggcgcaccctccagaaatgcttccggtagacaacgtatgagtgacaagatcaatttgtttgacgcttcctttctggacaaagtgtgtcacaatatagagccacttttggtcccatgtaaggatccgagaccatacttcgtactgctggaagattcgtatttccatcttgaagcttgtggtaacagatccgattatggcagccattatcccccgcctgccaccagcgacgagctcttggtcgacaagagaaactccacgacagcaaaggtatgacagaagatgagagcggcttgcatcaagatccgtaaaatatgtactattcgacttgtggaggttgtagtcggcttcaagaagtggtgtgtatgttgtcgttacacagggaagaaagactagcggcaagtttttgtctttgcaacgaattgatacgtgatggcttctcttctttgttaagaagttctggatgatggggcgaaagatgcgatactttaggaaggtcagttcagtcagaatttgtaggggcctggagagggaagactaaagattatgagcttgtcattagcctttcagtgaacacttacgtgaaatactagtggtaaagttttaagattgaccacaaggaagattgccaggaggaacttccaaagaccgaaggactgaatcgaactccaaagccattcaatcatcttggcgaatgtcatcagttctaaacgcatcgagcgaatttgtgatatttgagcagatctgagcagaaattggctttaagaggcaatgcaacgcagtcactgtgaatgtgttgtatgtgcactgtgctattgagaatcgattggaaagaagagaaaaagaaaaactccctcgtggaggtgacttatgattttatgatcgcataaaacgaatcatatatcgaatatgcgggttcatacggccgggaagccgaggcaaactcggcagtgatattgtcatcagttaattcttactgctaggattaagattaaggaattttgcccaattctcgaacgcattctcattggggcttgttagtaatacccgccacccagaaattggaacaccataattcttgaatacccatgtctttttggatatactgaaggatctgcggcagggcttgcaggctggtattgacaagatgcgtttcttctctttggacctgttcatgggtcgcatactggtttaaatcttggcgcagttccctttccactgttgcagaagcatgaggttgcggataggatactgacagaaatcaggtgtatggcgaacgtattggtaaattcacgatggtaaaattctctaactaactaaaaacaacaatggtccgtttttgacagtctggtcggacacaattagtaagcaatttgcatagtctaaaatcacatgattccatggtattggactcggtaatccatgtactcggtctgttttctgacagatactactgataacgcgtctaataattcaccgctggtagagagcctcaagggatctattcaggggcttgagctatcaagcaatatacctattttctggctccaactatttcagtatattaagctctacttttgtccgtcatcctttgcgacatagagtcgatgagcctgtcgacgtccatggtcttcagcgcttctgctaatgggaagcgggcgtatgatccgacattgttcctacggttctgggctcttgacagagcactccaaatgggatggtcgcgaggtagagtgtgcagtctcgcaatcgtgcgctgcgctcggtggcgaaggcgaaggtgcgtggggagtatataggcttcaacctctagggtcgcggttgctaccgtcctgaacgccgacaggattctgatcagcacgtttctctgaactgtgttcaagtgtcggatgtgaactttgtctctaagcgggtcatgctagaccgtcgatgcgtagtcaactataggcgcgacacatgcttggtagagctgtcgcatctgctctgggcgcaagtgtcgtagtccacttaaggcgattgtggtcttggtggcgcgcttgatagcctgctggacatgttccttccagcgaagtccctggtcgaacaccacccctagtgatttggctgtaggcgatggcttgacctcggtcccatcgaagatgattcgtccttccatatgctctcccctctttctggtgaggtggataagctcggttttctccgccgcgaagcaggatccagttctccgtgcccacttttcgatacgagggacatcctcggactgtatcttggttaaattttcttgaaccgagccccccactctccatcggaagtagtcgtcaatgaatgccgatgcacctccctgggagtcgacgggctggtcgaccaggtcggcgttaaagaatgcaaacaagatgggggaaagtggtgatccttgagctagcccagcattcaacagcagagcagtctcggtgcggaagtcgtcaaacccaatgctggcgtgccggtcgctcatgaagcttgcaatccattttctggccacaattgggatccgtcttgcctgcagcgacgcatccaggcttgtcttatttactccgttgaaggcgcctttaaggtcgaaggcaattagggtcaccaccttgtgcttgtaccaggctttgtcaatcgcactggacagcactagcagggcttgctcggtggtcctacccggccgtccgccgaactggctgtttggtagcaggccgtgtttttccgccagataggacaaccgtcgggccaacactgcctctaggagcttgccaagcgtgttaaggagtgagattgggcggtaggcaccaggttttgagtaatcaggcttgcctggttttcgtaggacgattatttttgcactcctccactgtctcggatggtgccctagctctacactcgctgtgaagatgctaacaataaaggccttgagatgcctccaaagcttcttccaaaccagcatcggtaaggtatcttccccgggcgctgtattccctttggctgctttcagtgatcgctcaatctctgattctgtgattgggtgccacgggagttccgtcgccggtgtggtaggtgggttgaactcgggtggactcatggcggggaagaacgcatccaggaatgccttcgctttctcttcgttttggatgcactcctccgagcccactcgcagtgctgggacgcaatcccatgtctctcggggcttcatgtacgtcgcagccttccagagcttcccttcaccagcttcgtcctggaattgcttccagtgtgaggacttggctttttcgatggtcctcgtccacgctcgtcgtttctgctgcatagcttcgaaggcagtcgtggtgttagcgtgctctcttcccagctcggcgcagtttgcctgccacctcctacgcagttggttgacttcgacttgttgggtcttaagatctggcgtgaaccatcgcttggagtatggcgtcgggcgtgtgtcgggtgtgaaccggtcgaccgcctgggccgtcaccgctgtaaggttttccactacccggtcgagtgttggccgggtcttgatctgcttccatgggttcatctgtcggactacttcctcgccgatcctagtccagtccgcgcgctcatacgccttccttgctttggtgtttggcctgctccggagttgaaggttccattctggataggtggcacggtggtcggatccatagttttcgtgatacagatagcatttgatgagcaagtccgggttatctgtcaccgtctggtcaatggtcgagttctgtctagagttgttgaatgcccagtaagtcgccgtccctcgagggagacaactgtggaggttgtgggcttggaagaaatcgatcaggtcgctggcgtcttcaatgaatctaggagcgatatagttgttgccccacattggatggtgtcggttgaaatcaccagaaacaataatactcgtcgcgcgctgctcattttgtgtggcgcttgtgatagagttttgtatcgccgtgagggctggtaatgctgacgagtcgttgcccttgaaaagtggtactggaggtatgtagaccgaaattaccagcgttgggagtcggctgtccagatcttaacggccgcgacatctgggtggtcgtatggtagttggcgatgtgatgaggtagaaattcttcgattgacatagagtaagctgcgaaatcgaacggcgtcagtctgggttgtaggtcgggataaatgccaggcgctgtggttgatatgcgttcggtaggtggtaatagatggttcctggatcagcagaacgtccaactctcggctctggggatcgttgatcagcgcctccatcctcggtcccgatttcatcatgttcaactgtaggatgcggaggtacttctctagcatctggtagggttggaggtcgatggtattgggcactctcgatcgcccgtagggtgttcaccactgcaatccagacaccgggctctcactccaggcgggcatcgctcccgctcgtgttgtcctgcacagtgtccgcatcgtggtgtttccttgtatgaccacgctagatgaccgaaacgttggcaccggaagcacctctttttcttgatctcgcggcgttccacgctaccgatatatctttgtccaacaaggagaccattgttgaggatgtattctgctccttctgcagagtcaaaccagataccaagcgacgcgaacttccccagaactttatctttccgcttaagccatgctaactcttcgatttggaagccttgttcggctaggtcgttttcttccataattgtttgaatggcttgagagttcgcattctctaggtcgaagttttcagtcggagtgcggtgcactacgacgccgaatcgcggtttgaccagctttgtattttttcctagctcattcagccattcagtgttgttgcgggctgcttcggccgaccctgggtccttgaagcgaactaaatatcccgttttagtggtgccaatgccggcaacttgtgcatcttgagttggaggtgcgcttaacagcgctgaacggatataggggttagccgagtcggtagagaggtatcgcccgaaactgttcccttctctactctcattatctctcggatctaccgataatctctgtgtgctaatgcggacgcagttccggtccttttcgggtcgttggaggcttggttgcgggtcactggtaccgctggctgctatcgctgcccaagttctgggcgggtttggttgtgggctggtttcgatttgtgctcttagagccctgacttcttcatggagcctgtcgttctgctctcggaggacgttctggtcgtgcttgacctcttctaggtcggctttggtggattcgatgagcgtggtttggcgatggatgatatccttgaggttatcgatgagcttccacacctctctggtggtaatccggcctgtgccctcggcgggtgtataggcttcgccatttctcgttcttttccctatgatttggcctgcgtcgatcgatactcgaggttggaagtcttcaactgagaagctggcctgggtttcttgggtgtttgtgggagggggctcgggccctcccgctggtgggtccgccatcgttccggggttagctcccgctcggtacacaaccacaacagttttatatcggaaatgcgtccttatatacaggatcactcctattgttgctctatgcccccgatcgataccgtacggttacaggatcgactttctacaggatggatcgaaatcagtttcaccactttgctctcatagaatctttctcgaaccctatgacgaaacacgctaattcatttccgatttagcgtagtttcaaatattgaatcgtattgaaaggcgttatcacgtgttatattgttgactcatttgttcgtaagagtattacgaacaaatgagtcaacaatataacacgtgacctgttgctgtcttcgggtctgccatccacatgaaaaggaaaaggatcacccatatgcaattgtaccttttactaggtggaccatacaaaaggttcatatataaatgctgatttttcagtactacaaaagtctctaaaaacttattataacctatcatatataacaatctactctatttaaatactatattcaagttccagcctaggttttagggagcccactacgagcccacttaaagtattacactttgaaattttgacctactatcgcgcttaacataagatattcgactactaaggcgtccgggaaacttacccttacaatttagtaatagaatattagtgctgcacttacaataaaatgatattatataattaagtcgaaaaaaaacgagtatttatatatgtaccttttgtgtggtccgcctagtaaaaggtacagttgcatatgtatgggtggtccttttcccttttttcatatggatggcagaccctccgtgaggaaggtctgtaatttctgtaaaaaaaaatgtaagggccggttagtaccgagagcggttaaggctgagagattagggttgagtaaatcttcgagctaccaaaaccaggttgcaatgtaagattgaatgacttaaaatacattaaaggtaattccataatgcataaatacagtagatggaataatccaaatcaaatatctacatatgtacatccctaacggcctcggaggttcggccgatatcgcctccttcctcttttgggccttggctttttggtcattttctttgtgaggctccaacccataatggccgaacgctcaacccataagcaaggcaagacacttcagaattacgaataaaatgggcggggtaagcggatactggccaatagcgtaccctatatccgccacatagacagttgccaagttgaaactgagctaagaatgggatcgcatgggaacgggcgctcagggcgctcggggcgttcgtttaaggggctatgctcagccccgcccgggaaataaaaaagtaaagtgtttttgctatgaaatattccacatatcttttcttttgtttcccatttttcttccctggaatctcaagatggagacggcggatggtgaggtccctctacggcaacttccgagaagctcaaacaatcttcacgcacctgaatactccagacacgattcctcagccgagtctgacccgcgacatgatgaggagcttccatcatatacccaggtgcggtcaacaggacaaattctaggacgagggcacagtactttgcttcatcgatcggcttgggtatttgcattcacgatcatttacgtcgtactcgtcgtctacgcctgggccatgactgctgtactgtcaacccgacccttcaaagacaaatcctgggcgtactcgtttggaacctcccgctccagttattactatcgttataatgaagcagacttcgatcaagagagaaatatctatcgttctgtgcggactatccataccttcattcaacttgtcactcttccctggatttccacagtctgtgctagtgccgctgtaatctatgcgcagaaccaaaaggatcctatgggccttcggctacgccaagtcacaacgctggctgaccgcaggtggatggacttttctttctatccagccctgatttataaatggaggcaatacggtagcaagctactggccactgcgatcttcatctgtgtgtttggtctcatcacatttcccatccagtcggtctttctcagttcacagtctgtcaaagtccggactttgccccaggagattgccactatctatgacttcagcccgaatagtggttattcatcttcatcatacgataccggcaaagacgtgctgaaagtccgcaatgccctcaacaaagcgaatgtcgatttctaccaacctaacttgtggagtaacaacagtggagtacaattcttgactctcaacgatctgtcttctcagacgtactactcccaggttccgagtggtttcaacacaggattacttcgtcagtttgctccacgtgtgaactccacagctacatatgagatcgtaagagcgtctgatttcccggtcgactgcagttcacgcccaggggcattttatgccgagtattcatcttcatacccgcagtacgttaattctacttcaagttattcttggggtgtcactgcatgcatgccaggaaatatgacgagatctccttggcagctggcacgtaaggcacgtaaccggcaggatttctctgaggttctctatctcaacatgacacaagaagattacagaacaagagatcatcaaactctttttcagatcactgtcaacaccacggctggcttctttgaattacccaactatatgaacaagggtgtacccggccccttactggatcaagatccagcggaactttgtgatcagcactgtccatcccaattcaacacatactattcggggtaccgccgtgacgggatcacagtggaaggcgctctcaaagccggatcgcttggtcccatctcaacagacaacaaaggaccgttgttatcggccgcgctggcaagcttcggccctggctctttcatcgactcattcattgcaaccgccgcaaccgttaaagcagacgacaaagttacagacgaggtgtcatcaagcctgggaaaagtatgcgctgcgaacaccccactcaccaacctcatggggtcttcctctctggagtgcgtatctgttgtgatcgatagttatggcgactattattaccctgttgggtcatacattgcgcaatggataaattacttccaagacaacgcggagccagttcagaaggccttcacatcagcggctttccttgccaatcaggaattcctttccagtcagaggggcagattttctgttgcccaagatttgggcgccgatatggatcttccatcaatttctcccgtgggaattatcgtagtctccatcttgatggcactttacttgctacctctgttggcgttgtcactctacgcgggtttttcctatcgatggaccgaaagattggattcctttgtgatgctgcgatttggagcctttgttggtgataagttctttcctttgctcattggtcgcgagagtgataaagttcctgagctggacgagatgcctggtgttattcgggatgtggcaacatactcaggcgacgaggttattaagattgggaggttggggttcggcgaaggcagcaggttgcgagaaggccatcggtacgagtgcttccaaggaaacgacgagccattgaatcattacgaatctcgacggatgcaacgggttattcaccgccgagcctaacaattgatatacgtatatgtactgggctagaaggaaccctcggtcatttctaatgatttgatttgatctaataataatgttcatatacgcaaataatctcgatgcttccaaggctatttcatgactcattagaccttatagtaggtacttatataactagtagccccttcacccttcaccgggatttcccccataaagcgcctgatttttcaaaatactaggatttattttatgaccagcctggcagcttggacaaactttattctggaaatgttcctcgttatgggtatagtattcgcatctttatcacgaattatgagatttatattgttccccgaggtctggatattattaaaatacaggaaggaattgggaaggagtcatcggaatctatcatatagttggtcctgggtaaccgagctgctgagggaggttcgagtaaatatgtacagtgtaagagtgtacggagtatcctgtgacactgtggctttttcatagacaaatttggaataattggtaatgtagttgacagtaacatatgttttaattctcaggaccctcacgcatctaatgtatctgttgatgtgggaatttgtcactgcatacctagctataggcgcgatcgaggttcagggatctaccaattccataaagactacgtaataaagaggactagataatatttgctagacatgggtaaagacagtgagatgtgtaaagaaaaacagacatggcaagagtcaggtcttctttgttttcctcggctctccaagttccacgctttctcaccctatgtataccatcacgccgcaatctattttgggcactcacttcagtggatacaggggttcgagacaaatggagttagctgatgtctttcgtggcttcaacgtgacccaagtgaagactctgaacctttggagttgaatccataagtctttgtttgacaaagccagcattaaagcccatttccatccggtacagcggaggagggttgtttgcccagacagagccccaacaagcatcacaagtcgtgtcaaagatcaaaggaataagccaaaagcgtattgaaggaatcctcgaagtcagatccactgagagtacgcctttgcaagaactcgccgaatgaggcgtttcaagagctatgttgaatgaacagcatgaaaaggagattagaccttcatccaagagaatgctctgtcatctttgtttcatcttgtctacggccttcaagctttcttcgacctcccataatcgaggcttccgtccggtgagatgggttcggcgtatacaaaatgctaaggatacaaataccttcgaggttctctcctttatatttatcattcatacattctcaatatttgatttgctagttacctagagaaagaaccaccttgctcgtgactatcttctctgttgcaagatgcctccacggccttttttccctcgcgccgcaaaacctggcagtaaagatgcatccaagaagaccgatggaaaacgcaaggcagatagcttgacgacccgggattttaacctggtccgcgatgtcccggaaactttgttcaaatcgggcttcattactcgcatggacccagaaaacccatgttgtcggcgatttggatcggacttggtaggagtattcgatcgcaagttgcgattttcttcgagttgtcagcaatagaccacgtaagaaccgcaatacccttacccaacaccgccgaggccaatcagcgctatcctcgaccccgcgaccgagttcttaccgtagatctgatcaagcagtgtctcgcgacggacaaaatctggaccacgcgtgaatggcacagttgacaaagggctgggcggagtttctggcggctctagagggaagcggcaattagtcagtcggtcttgaccttgtttggttccgttcctgacttacccggtggcaggtgaaaaagtgccgtaaatgtgccataattgattcccacctgggctccatggttgacaccagagtgacttgtcgacgcatagtttacactagagtgactcgttatcatggccgtataaatttgcctgtctgtagttcattacaagctcttctctggctctcaactgcaggaggggtacgtcatcaggtgactcggctccgcggcgctaagacaggagaccagatttgcaggccacccacgtcgaaccgtggggcaggactagcaccttcccaggaaccggatcgacccgagccagaacactacagctcaagcgcagcacgcgataatcagaccggtacatacccgcggggtgaaaagcatgctttgacagtatgacgtcgagagcttattgctgccggctttatcaagtacacgatggatactttgagatcgcattttgttgttgctatggtgaaactaacgtatggttttccagccaagcaaccacttttttgaggtccgcagcttgagatgggcccccgagctcccaggaactgcgagatcgcccatgtcacgtgcgtttcccaagagccagcatcccccagacttttcacccaaattcattttacccgctcactgagcagaggtggtgcaagggtgagcagatggagttccctatcccccctccggcggtcgaccactgagtctgccaaagctctcctatatcaacgtccagacttttcttcgcaatatggcgccaagactccctctctcaaagctcgaaatgacccagcacatgatattgagcaaatcattgagtgcctcgcaaatgactaaagctgctgaatatagtaagcgttccatcatcaacatcagcaacaacctccgccagtttggaaatgtcggagcacccgcaactcgagtcggtcgacgacgaagcataactcctccgatgatagaagcactgtgtgatcgcctcctcgaaaagcccgggctatatgtggacgagaggacaatctttttatgggacgagttccgtgtccaggtcacaaattcgagcctcaaacgggctctcgcttcggtgggctggtcgaagaatgtgactcgacagagagcaaaggaacaaaatgcggatctacgagacttttatatacacaacctgtcggactttcagtcgcatcacttggtctatttggatgagtctggatgcgataaacggattgggttcagacggacaggttggtctcctttaggtacggcaccattacaggtagccaacttccatcgggaccagtggtaccagatattgcgtgcatattgccaagatggaatagtgctctctcgtatatttcagggctccacggattccgcagtcttcgaggacttcattggtcagcttcttaggcattgcggaagatggcctgagccaaagtccgtcctagtcatagacaatgcatctttccatcattctgatcgtatcgaggaactgtgtactaaagcaggagtaaagctagtatatcttgatggcggcaacgagaacagggacagagaaagactgtattcgctatctgacagatgactgggggaggaagaaggaagagaggaagacagacagagagagagctggagacaaacaaacagacaggcatgactagcctgaacaaacaggcagccagccaggtcacatgacccaggctccaacactatagctcctgtcagggatatacatgaagtatataggacggatggagttatgggctatgcgagacccacatggcgtatgtgggttcccctgaacgcgaggaagctaccttttttgcttcctcacgctacgtcttgtatctagagtcgactatatctttctttaattagtcattactcatctgaacaccttgtcttacacatggatggatctaatataaacaatctaaaaggcaaggttatatgaaccaaccagcagagaacccaattaaatatgcactagtaataaaggaaatcaaccatatatctgcctgcagagcacatgtccagcgcaactacctaatgctcatatattacttggctaccgaacattttgcatcacatgctctaacaggcccttgtaacaaaaaaaaaagatattatacaggggctagttaactactactcactgggatcgctagtttgccttgctagttaggcgcaataatgtaacttttttccaatcgcttgacatgtgtagacatcccttggaactgcatagactcaccacacacccaaattcgatgggcctctataatctatatcatttgctacagctacatgttatatgaggaatgctagacctcgctgtatatcagtgcgtaattttcggatgagttgcacatcgtatattagttatatcagggtaacttaacaagatgatgtagcaagaacatcatgcgtgaatgaacattcgccattgtggaaccatcgaatatagaaagcatcagagcaaagctgcgactgctgcagcaaccacgggagcagctgtgatcaatgaaccggcaggtccagcggctgcagctccaggtgtttcggtcgccgcgggggccgtaaacgacttcactcccccagtgacgtccatcttgtagtagctgctggctgccgtcgaagaagtcgccgaagatgaggacgaagaggcggtactacctcctcttacggttccacccatgctagcgctcatggtgcagctggcagattcggaccaggatttgaaagagcagtcatacgtttcggtaacggtaacatcgtaaccgtctgtgcctggattggtggcgacgtattgtgcagcgaagttcacggtctcgggaccttgggtaatcgtccacgaagtgacaatgtcgcagtctgatttggcgacgtcatccatacaaccgacatggtatgtggtggcttcggcattgataccagcaacgctggcagcatagctagtcacgccggggaggtcattgtcccacgtgggggagaagattccaatggtggtgcgggtgctagattccttggctcgagcacccagtgatgcgaggaacgcagcggcaaagatagaggtacgcatactgatagggtttttcaaatatttagggtgaagtttagcagagaggcgagtcgactaaaagttctaacatccggggcaaaccgttcgctttaaataaagacaaaccaagctactgtgaaacttcgcttatcgagcaattttggacgactgagctatgttagcgtagacctagagggtactagtgaagtgtgctagtctgggctattttcatcattcacccattggaccctgaaacgttggactggacgagaataggactggcgttcgactaccttgctagcgttacaaccgagtagcaaagcacttcaattttgggggacggaccccgctgaataatacatcacgggggccctgttacgatgtataattaccgtgtagaattccgaaaggattagataaatgcgaatacaaatacaggaacaattttattcgcgcgaattgttgagatgaaatgattgtattgggtggagttgactcattttctaggtgggactcattcattacatatctcttggtagtagtccccgccataagctctagcgggtctgaattagtcatcgcacagtgaaagaagatcatttggatccgattgtgggccaatgaaggtcgggtattgggtctaaaaaggcttacgtagtctgagtgctcactgggcactccgggcacagaaggaaattattttgcctttgtggtaagggagagtggcagcggggatgtccgtaagattaagccaaggaacggtggagcgctagtgggcaaatatgggtgtcgtgggttttcgtgtgagacataacgcgggtatccccgattttcaccttttccaatctttttgttaattcttttcttattttcccttgcttttccacaaatctttggactcgattttgcctcgggtgacctttggccttggaaactgtgccaaggataagccctggcccctgaaaagtcacctgtttatataatttgaagtgctcttcttttctatctccgttttcatttccatttccccatcttgaatattctaaatactcaaatatgtacacattcaataataggctgtacctggggtcccttttggccttgcaggcctgcaccaaggtcataggcgcctcagctacatcgggtgtcctcgaagtcgacttggtcttcccacgcaatgagacatatgcgccctctgcacaaatgcccgttgtgtttgcaattcagaacccgcatctggttgcgccgcttaacatgaaggtttcttacatcataacgcctccccgcaattacagtaacatcagcgagccagccctattcaatatgaactcgaccagtctcttcagcagcgatccttacttcctctataacaacactgactttgtcaacctcgagggcacgtgggaactcacatggttcgtggaatacggacgttgcaccgggtccagcggggatattatgttttaccccagcaattccacgattgatagtatcatcttcaccaccaagagtggtgccgcgaagccggacctcattgctgctggcaagaaagatacttgcgctacaggtattgcagcctggaatgttaccggggcaatggatgtggaaggcgccgattggggcggctatgacacctgcgcggtcgtttcgaagagatcaccatgggctactgtggacccttgcgcagccaagttcgactctgctattgcttcgaatatctcggctgccttgaatgccactgcgggtgacaaagtctctgcagatgagaaaaattctaaagatgagaatgattctaaagagaaagatcctgcagctgataatgcgggcgctgtgcatctgccggggggtggtgtgacattgttgacagcaattttcgctgggctcacttacatctttgcataatcgtctcttttcattgattcgacattcaattctctgatcacacatgtatatattgtatttggttagagatcttggccaaaggaggcatttgtatcacagtttgaataaataaattctattcgcagtcacaggcaactacagcgtaagaacaaaaaagtaaataaatgagcgcattgtcgtttccatggcttggggcgcagctagttgggcattacgagatattcacttgcacgcgagacatagagccgcaaaacacagggaccccggaaggttgtttagtgaagaccaagcactcaaggtccggggctggtaggcctcggcttcgcggcgcgaccattcacggtggcgctcgaacgcctggacctccacttcgaggcgcgcttcaatggtccgctgcctcaccgtcccgttgaggtggggctccaccaaggggtggatatccgccgtaatgggtttggcgtacttgaatagacaatcgggacgctgaaggtcgcccgacactacatcccagacctgccttgctttgagataggaggtcatgagacgtttccaggttgcgaagttgtcgcttcctgtcagaggctcgatggccgtgactgctcggtcaggcgagtcatggaccagagcagacatagtgaggatagagaaagcggggtagatatataatcaagatcaagattgacaagatgattctcagatgagtagagacggcacccgagattttgctcccgggctcataacctgttgttgttcagaggtatgaattgattgtttattctagagggagagatgaggttatatatacaacacggagccaagttgattgtaaatcaacttggttgtctgtatagacatttcggagctaattccgatggtgcggcttgcttcctgatctgcaccagcctcatatcacaacagaaaccttgggtcaaaggcaacttcgataattctaaactggaagataaatgctcaaaatggaggaagaaatttccgtacaatcacagggtgtcttgagggctctttcacggttcgtgaatgtattccactgtcatctaggaagtgttacagcgtcactaggcttatagattgctaggtgtcaaaaatctggcgaattcaaagatccgacccttgtctgcgagggagaaaggatcaacgtatataaagttgtggtttgctctcaatcgggcgtacttcatgttgcctgtactggcaactccaaggttagtaatttactatagcactaccaatgaggagctaagattcgtctaggaggcgtcatccggcgtctatgagtttttggacgactcaaaaattattgttgggaagccagtaagcttcttttacatcccaaaatgcataaaatatcccaggtcacgggctcccaattgtttgacctgtttgtcaaaccgcgggtgacccgcgcttaaccacatgcggtttctggcagcggcataaccaaccgcagttaggagaatccctaccctcaaccgcggttgctgccgagctctaacgacaagagcaaaggacggggagctgtcacgcaaaaggaaaaagacagctttgcgcctgaaggctgtagtgccagattcgacctaacttctcctgattccccagcgactatcgactcttctgcttgtcacagggactaattaccattaaaaaattgttggccgcggcgcatcttgcttgactcaatttcagattccaaaattacaacgagtaaggaaattaggtttccggagcatctaccgccgggcaatctccgttacgacgcactcaatcacagattacatagagcagagaaatatactccgcccatagggatctacggttgaatgattttgataatgcaacgcactattcgctacctgatgccgttccagcataatgcggcacctgacaggccgtgacagatcagttgttttcagccgaggaagtaccgccgctggcttggggttccgggctttcaatggctattccccttatcctcagatggcctcttagttttaccccgaagactgggggctcccaagcacgcatgcaaactgaagttgagaagatgtttttgccgctgtgcttagtgatatagatatgaagaataagagtttttattatttgtcaggaatgtctgccttaactcgtacagttctgccggtcatttattaactatataccttcggtaacaaattctgcccagagtagactatattgtcttcatactgcttttttcccacgtcgtgaggcacacctacaggccttgctcaatcaacccatcttcataaagttgcagtatcatacgtattgcctcctaatactcatgtgaagataattgaagtgttcaggtgatgacgacaacagtcggctttggtcagattattgacgaattggatactaatgtaaatacagtgaaaagggaataaagagtgctgcgaaacttgactcgttggaagccaacctggtgctagtaatcggaaatttgtgtcgctcgatgcgaaattccagcttgctcgctgcatcagagcgatgagttgccagtgggttttccagcctgagggatgaaatgactgctgccagctacgttctcacggcgatggttatccggatctgattcaaccctctggtcaggcttatccgctgcacggttgcggattcctgtaggctttccagcctgaggcatgaaaggggtgctggcagcgacattctcgcgatgactgttatcctgatctgaactcactctggggtccagcatgttggcaattccattattgtgaagaccacctttgccataattgtgtgcatatcctagatgagcatctgggacgttctggcttcctgataatttagttagatctgataagtgtatacaataactgaaagaagcaaagaggtgaactgtaccgctgttgactcgagggtcgagtttattagcaagcttggagcggtaaggtccgccgttgctcgactgatccgacataatgaagtgtggtgtcccgcagtggttatcagcactggattaagtaactttgctcctcccctgagcggcattatatttgtcttcattggccgattacgtaggggtgacatcagcaaactcacagaaaaaccatcgggtcgccagcttagtcatgcaaaactaaatccaccaaattcgtagattattggcccctatcgggttttgctagctcaggaataatttttccattgtatttctactgttggaccatacttcagactgattcggccatagccccaggaaccgcacttgaggttccaggagttgatgaagctccaccaataaggttgagtgacgtcattgctctggctcggtccccaagaacgagttaagcacctcttctttctgttgcccacacttattgcccgtatttcaatttgtattcgtaatattgattacacattccagagcccacattttaggtcgtgagacccctcacgttcctgggatcatatccgaccccaggaccatggcatggctcccaggtacgtggaagctttattagagttcctcaaaagctttatggtccggggatggatgtgacggtctcacgtatacatagaggtggatagtgtttcaagatgaataatcaatgttaagaacaactatagttgactctagatacaagacgtagcgcgaggaagcaaaagaaaggtagcttcctcgcgttcagggccatatacaccatgtgggtcccgcgtagatcatatctctatccgttccgtatgcttcatgtatatccctgacagcaatcaatagcgtgcctgggagcatgaaatctgggatcagttattatctggcgctgatttagacctccctgaattttagatcaagtgcccaatagcggagcagagtggggccgagatgaccaaagtcgtcatagtagatatattccaggaaacctgctgctctcagaccgcgtctgcggatttgtggtaagtacctgatcgtcagattgggtggctgagctgagatctgcggggttcatgaatgtaacttgacgtttactgtttgcattctaaccacgctatcacactacctgaaatttcgtggtaatggcactgcacctcggcacaccacatgatatctgcagtccaagggtcatgaaattcaattttcatagcaaaatcgccattattgctatatagcgagtattggccgtcggtgtagccaaggtagctgacgaaataatgtcaggtccatttgacctttcttagaagttgaaatctcaaggcctcaccactgtctattgatgcgggcaacccaaatatattaactggttatactatgaacataatgtaactatctaatcaataaaatatttgcacaataaaaagatgctcggcatctactaagtgttgtgaggccccagatcctactcctgtagggtggttccaaggtttagatctctctgtgtgtgggtgtgtctccagactgtctccacattggtcaacccgtgggtagttttgatgagtctcaatactaaaattatttatgcatctcgtcacaggctcgattcatactatgtccatgtgctgtcggttgatccatcacgttgattaaatatatcactgagacctcaggacttcaggtctaattttataagctgtacaatcacatcgccctcctctgctagactaaatcatacataggcttcaatccaagggggccattcagtttgttctgactctccgccaaccaagttgccccgtggtgaaagcacactgcgagattgagccatgagtctcatttggtacaatcgccacatgtcccaaagaggtataccaagtcgtcgaaatgctttgaaatccactttccagagagcgtgataactacggcctttttcaccgccacgaagggcattgaaagaaccaagcacggcatttctgcccttcgcaaatctcggactccgacgccatgtcgaatcaacttgtgtattttgaatatttggcagaggccagcatgtctgtaccgccaaatcggttggtggcggaatggtaactaaatatgaagcccgatagctgagaattgttggtttggaggaacatagatcgacgacgcactccgaaattgtctggagctcttctattccccccggattccgacaccactctatatattgttcaatgaagccgtccagatcacaggtataccatagccaatggtttattgcagcattatagatctgatggaagagctcaagtttccagagacctcgatgcgtccgataagtctcgatccatgatggtagatcaatatcgaattggataagctcgccaccttttggtggtggaagtattctattcacccaatctataacattggcatcggaagccataggacggcggggctctgcggactcgagacgactaatgaaacgctgaagacaagcacaggcagtgagatgtattttcgctgctgtatttacagtccgatggaccgcgcctagtgagtgggtggtggaaagggaaataggtcgtataacatccgctggtgagctagcgagctcttctagcagggcttgcggagtgaatgatgtcgatagaatagaggctaggagcgtgaaatagtaatgaagtccgtgcgaggtgagggagcaatttctcaggacgttttcggtgatgtttttgaaccagccgttgaaagcttccttcactctgggagatataggcgcttactcgatatcaagagtaagattgaagttataaagggtacttttgagtggcgctgtatagatgacaaagattacgtatcccttctccatgaggacacatcccaacccccttccatttctccccgctccccaccactgcccacctctgcaagtcatttaatctatttaggtttattatgtatttgtgttatttcaaaatccaagcattctggttttttctcttcccccctatcttcctacccactaccatccagagggtgcatctcatccatctttgctaaccttcctgcgtaatatcaagatggggtggagcaaggatcattgccctcggcatgtagcacttctagctgactctctccttcatttcttcttgctccttctcttgtctttttttacaaaaccctcatacgtgcataatttaactgatagaatgctcagatggcttgcaaacacgctatttaccaaacagtagcccatatgcgtatccctcataatgaacacgaccggaatagaccgcccggccttcaatccctccagccaccgagcccagtgctcgtgcatacacaatctcgtggtgcacaattgcctgctttgtcaaattaatcgcgaagacttgcccacccccaagaataaaccgggccgtcagcccaggggattccatgatcccaccagtgggcggataggttgcattagatctcactcggcgcaccttcacggcaaaatgcagcaagaccaactcttaattgactccagccacctctccaaggcggacctttgtcacacccacctgtccgatccattcctcagtgggcagctgtacaaccgaggtgtctggatatatgaactggccgtagacacgtcccatggacgtggagttcaagtaccattttacagagaaaggcgtgcctcgacccagaacgaagaggagcagagagatcacagtcgccagcaaggtcaacaacaatacaatgaaagcggggatgccataagcccaccggtagtggatcctgcgattgaactttcgaacaaatgttccgcccgcgttctcgtcatcagcgctgtttgcactggctgcttgagtatgccagcctctggtgccggtgacagcgttggctgcaacattcgtccagacaaggttcaggattttcgcactgccctcggcatccttggacaggtcctgccaacgagagaaaatgcccaaatcttcatcacctgaataggtaacagcaagactactggcctggatcccgtacgacatactcatggcatgcacgtggaagtcaactccgggaagattctgcaaattcgaataagggctcgcatcatgcctttggtaccccggtagatgcagccactcccgctggaaagaaacgaggtctggtcgattccgatccgaaggttggataaagccccaaattgggttcgcctcctgttcaggtagacctgtgatttccacgctccaccatggtttgctctcgtagtctttagcttcgatttgtgcaactgagaggccggcgagctggcctgttccattatatgtgaagtcgacagtcttgacaattgcccttgttgcggatgcacaggtgtaaatgggcatcataagcctatcgcctggaaggaagaggattgcttctgttccatcacgtttgctaggggctccaaacaacattccacaactgatggcgacactgcttctgttcgccactactcttccattcgttcctttgcactgggtcactgttcagcttagttagtactcgtctcatattcttccagtgatgctaagatacgcacgggctagatcaaagtcattctggctgatattgaacgggttggtgtagttcgacactagggagcctgtggtgttgactaatgatggcacggtgccattgaagagtcttctaggtaacgagccaaaatacctgccgaactcgggccatgtatgtatcctgtctcgctgtccatattgattcgtaaactcctcatggagaggaaagtttttccctatctccgagtcaagataatttgtagtgttaggaaggggattcgtcacattcaagaatgccatcgtgtaaacgttgttggcccatgctgctcgatatgctcgactgtgcaggtcgatggcatttgccggagagatatcattatcgaccatgggttcaccggtatgtagattcacaaaaccaccccggtcaacaagcgccaaattttccacctcgtcactgaagacggagctaaacagaggttctttcgcgtcaaattcaagggtgaggttagtattgacacaggcagtctccggttccagaaacaagatatcttctgaccaagcgctaccatggacatgtggcgatggagttgaatggtttcgcaatccaattcctccactcttggtgtcgacaataagcccctcgactacatctattgcgccattcaagagtaaactctgaatttgacgatatgcgccgatcaagaaccgtggcccatcatcattcaaagtgctgctggagtatgttctccattggatgtcgaataagctcgagacactctcgtcaaagtcactgaggccccctgtgaatgtctcaacgactttcgctggcaatgtataatcgtaattctcgagctcatcccacggagtgaagttcgagggaagggttgtattcgaacctctgcatcgaagaggcgctgacagtccacacaaacgattcaaacccaatacactgcggcctggtgtgccataacccatgggacctgcatccttggcataatgaaagacgtcgtgtgttccagagctatcaagactgatagcgtcgtacaggccaataggtgtgactatggcagcaatgcccactaatcctaagatcagagaggccttgaccagatgacagcaaggactggcctgtgaacgctccgtgacgcaaccgagtcgcttcccaagatgttaggccaataggaggagtggaggaaccggctcacaaccgacctgtcgatgcattagcagttcttttattccgcgtgagaatgttggggagataccatgttgtgaggttgttctccggcttcaggataccggtcaacaatgcccccagtatgacaggaagaagcagttgaactaaggaggcataaaaagcagttatgcatagatcccttctggcatatctcatacaacacaccacttaccgacaaaaaccagggcagcaataataccggccacctggctgacagtgagctccaccatagagtatgatactatgcctaagcagcataaatctcgtcacggttcgaagaagctgggctggtatgagcccagtaatccggggttctgcaaaaaaaaaaaaaaaaggacgctgatcttccattctagtcatatagatgattcctttaataaaggcatgagtggcaggctgtgctgcggctcttgggttgctgggcaatcaatattgcaaatacgaggccaagaacgaacatatatcagcaggtgcgactatgaacatcgtgatggccttgtggcgttgccgagccgccattgtcttggccatatatagcgtgcatcttttgccaagggctaagtaagaaagagagaaataattgcgttgaaggcttctcttgctggcacaaacagccccatggtggttgaatttgggaaaattcctgatttaaaccctttgaattgaggtgagtctctcatacaggcatgaagctattctgtagattcttctctctgtgctgattgtaaaagtaatgagcaagcaagataggggcaggcttactttttaccgcacttgggccgtttaggttagatgttcaacattcggtaccaatggatgaccagcccaactattgctctaacagctacaggaggacaagcatcttggcaagctgggaagacttcccgcccgtatgcgctggaggaggctttgggctcacattaaagctcttggctcattggcttaatggtagcagtgagttccgagccaatttaagtaacctcgagtttagtttcgaggatggagtgaaatatctctgtttgctggaatggtctattgcgtcgttgggaggtgtgcaggagagatactgagataggaaagagataaagagggggaaagagtggccaaggacggaaggcaatttttcagcctaacagtgattgccaaaaatggcagtatccacgtcaatcatctcctatgcactattggtccactgcaggcgcccgccccgcacaatcttctgtgacactagtgacatacatagtgctcgcccatattctcgcgggcacctgcaatcccctgaattatgatgtgcgactaattcactctcagtagcgcccgttgagcgtttcatgtgttggccgtgaattatgcttacctgccactgaaggtgtctttggctctcttaacaccatgacgtttatatgaacggcttgaattaacagtgtgctgatcgaatcttaaaccgtccaggcgttgatgaagaaggatggagatggcagggctgtcgtgcatgcggtatataccatcattgtattccccttacccctacgaagcgtttctaatttatgattggctcgcggctactcctttctccatcttggagtagggtcggactacggggagaagaaagaactcggtaatcctactggctgtcccgcctatttacagccctgtcgacgaaagtggccggatacggttagcgtatctcttactcttgttgagagtgccactagaccgaaattagcaacacttcactccgtgtgtttcgagcaccttcatcacttcttgacctgaatgccagtgtcaattttctcccgcgaacgaactacaggatggatcgaaatcagtttcaccacttacacacatagattctttcttgaatcctcattcaaacaatgctatgcctattacagttactctacccctgactcattttctcggcggtactccaatacagtcgtaaataacaatataaaaatagcttccgtatcacgcttgtatatctttcgagggttctagaatgtcgaaacaatgcccctcactcttggaaatattgcacaggatggatcgaaatcggtttcaccatttcctcacagacattgtttctgtaaccttctttcgaagcactcaataccagtttctagaaagccctcaaacaggtgaattgaagaagtttaggtatctatgaattgtgaaatctatatctgcttacacaggctgcacccacgttcccctcatcccgtatgagcgcgagaatcagcttcagccccgagtcacttagtaggagtgttttgttcacttttgctttatttttccttcatccttctcagtgatcccatactcccttatttaaaataataccggaaaaaccgagaatttaatgaacagtgcagctattggcatagtgaacccaattttagtattgtaacggttgtacaacggaattcccgcattaaggatctcccagatggcaacccacgggttgggttttggcgaggcctacctaagaacgccagggtataggatgttgttcgtgacttgatgacagatggattggttggttctcggtggcccatcagtaagttgcggccccataatcgattggtatctggtatgtccgtaacagagaggaggtggaggagaagaatggcgggggtctgacctagaggcttgcgtataaaaaaaagaagagggggaaagagggcggggtaaaggtttgtgtcatcatggccgctctgtctgcctcaaaataggcactgatcttgttcttgttgacattgttgatgcctgttgcttcatctctttcttcccctatatcatgacccattcgcccttctttgccccctaatttcctggccccgaattctccacgtcctacaaccccgcagcgcctacttctttcccgtcaaggtggccagcactcttgtcactgtaaatggcccaacgtgaacattacttcgctcgcacatcaagaccctaagatgcccgtcacactgaagacttccgacaaagaacctgtggcctggacaggctggagatgtgaaaatgccgagaatttccttaaagatgcatgcaagaccgaatactatcgctgcaagcagattctccaaagttccatcactagactccccgacgcctctcaaactcacatcagccccagcactcacggctttgtgcgagcagtatggcatgcttattcagaccaccacaatctgatcttgcgaccggaggacgtgtggttttccatcctagtccagcttagcttctacatccaggcccactcggaggaactgcgagagcatttcgtcgagcatgagggccagaagcaccttaaagtaattgaagctggaaccatcggatctgtggatgtgggccagctggcagtgcagttgaccgggctcattcagcagaacgtggtagacccggagcttcgcgattggatcatgccctctttcagtactactaccacgacggacgagattgtcgccgccgtgattatgatgggaacgatgcaaaaatacttctcctatgagatggagatgacgtgcggtattccgtcggtgactttgctcggtgagaaagacgactgggaacagcttcaaggcagaatcgacaagatttcgacgctcggcgaagagccgacccactttgcatctcttctgaaaccggttctagagaaatttgtcgcctctttcgacgactccccttcccctgacgtaacggacttctggaaccagtgtgtccattttgaatcgatgggaagtggtcctaactacctttcaggatgggtcacggctttctgcttttgggacacagacggaaagagactttatggaccccagggcctagaatgggcggagaatacatatccccggattaacacgtccgatataccaattggatgcgtcagtgtgcccgtcaaggtgaacgataatggttgtgagctcaagacctcgatggtcgctggcatggttggtatcgaggcaaagtccggagcgaacgctctagtatttgatggacaactggttaaaaattctatccagccgttctcgggatggtggatgtttgaggaattgagtgagacggcacttacagaaaagaaagagaaggaacgtctgagggaagaggctttctacgaggaaattagaaagagattggaaccctaaagggccttgcggcaatgactaagaaggtgaaggaatgaagagtgaaatcatgaatgattgctaggctcaggaatgaccagaggcttgggataaatttcctttactactctgtatcatacctgattaggttccgttcatgctcgataatcgggtacttcttaagatggtacggaattctacagtagataggctcatgctttgaaggagccaggcatgggactatcttggttcaactactcataattgattgctaagagacccctcctcgggaggctgtttggaggtagagcatagaggtgtcgaatgtagtattcacaagcgaatatggatgtattcacgaaagaagcaataacttacacatcctactgacaggggtactccggaagaacccccaatatagagcgcgttttggcgttggagcctcgagaatcaatcgaagagggtaggtggttgcatcagtttcggggcgcactgtatagccattggagtttcggaacatactgtagcttccaccgacgtctgtaccaatttccacaattgaggaagacacatcgcggtagagatgtcaataggcagtgaaacgtaaccgcgtgttgaccctaaggtgaaaaactagtgtctaagtacgtgaagatgactggtatttggccttaagtgagaaggttcctatttcggcatggtcttggtaagcatttcctttttcctttcatgcgtcctgccaactaaagctgttatcaaactagtatagcttgatgtggtgactctaggaaggcagagatccaatacgacagacagttgagctctagcaaattcatggtcgctttctgcagaaggcaacatagtgcggacaatagaaaaagaggaaaaataataatgaagaaaaacgtagaacacgaaaaccaaagatatgcacgtaaaaccatcaaatatgtcgctgcaaatagttgctgcaaattcaacacgtgggtctcaacaggcctcaatcaagaaatgtgtccttcaacgcctcctatcaagttggtggttgacagaaaccgagaagcctacaaatacgtcctctatccccggcaatttactctacgattattcacctggttttgcaacgtcgagaggcttgtgtctgacgcgctcgataagttctcccttttgatggaatactggaatttataccgtactgacatttatagtatacattgtggaccagcaaatcagacagtgcctgtaagagatgtgattccaagcagcttcactgtcccattcacgccagtcaatcaaatatattagatttgggttagctggtcaaagtgtctatgcgaagtcgtctctgctatagcagccgactgagttgatctactgtcacgcctctggatggacttcaaatttgaagcacaactgctcatactttaggtatgtgaaaacccaagttttcggcttagggtttatgctgtagatatgtagaggtctggaaatcctgtttgaaactgtactgacttgaaagacgcgggacaaccagatccatggacattcgaccatacgccagtgcaagggccacagcttcttgtggtctcttcatcctggtgttgactatcagaacatgtgagttatgggatcccacgctgatctactggctgataattgacagtgaacctttgggagctcaccagagtggccctgataaccctgcactaccgtcagtgctccacgcaaagccatggcttacacacgattcctagccccgtcgcttcgaacaatgcagcatgtcctaggtggaagatcgcaaaccaaggtagcgagtcaacaacagggtgcggccatccacgtgcgaacttcgttgcatagaaccttgagactcccatttccatgctaaggtgagtgaaatataacgcctacagttgcgctgtgtctgattatccgcgccaagccttattcccctaactacgaacaccactgacatcttcacactattgtaggggcacccatcatcgacggtgaaatatactgtggcgagtggcctattccgccagatcgaagacaagaccaaggtgtcggccgacgagcgtgctccatcgcgtcttccgccctcgtccccaccgccttcgcactattgtggagccctgaacctctggcatcgcgacacattcatccaccatggaagtgcaatgtttatcacaagcgcgttcgtcacgcgcgtttactgtctcaacaaattgtcttgtgcaccccagcgcggcttttttgaagcgagtgcagattgcgatgagcttgagtgcgacgtggcatggctggtgactgcattgaagagagttgtaagtgatctagttgtgaagccgatataatcattgcgcaaactgattatcccgtcttaagcgcactttgggatttccatgaacaggtacgctacgacaactcgtccaactagatcagtccttgctgactcggatcgtacaataggagaacaccctcatttctgtcactcgagtcgaatgccacgcgaacaaatatcttgtctgctcgagctcccctatacaattacgattgcatgctctctctcccttccacataactactatcgacaatgagtcaccagaaagttcgtgtcgcgtacctcggcctctttctccctagtgattctgtgtatcaggtcattgttcgatttgtctatatgatacaacccctgaactccgattagcctataccactacccgaatcacacctgtggctaagcgtataacctttcaaataccttcaagtggcgtaggctactggtatcgaatgcgtgatcctcgttgtcttcggatgacatttggtatctttccagaactagaaaaaggcacaggaatgctgatgttttgtcttacttcctggcagatgggcgattgttcgatttgtctacatgatacaactcctgaactccgaccagcctataccactacccgaatcatacctgtggctaagcatgcaacctttcaaataccttcaagtggcgtaggctgctggtatcgaatgcgtgatcctcgttgtctgcggatgacatttgatgtctttccagaagtggaaaaaggcgcaggaatgctgatgttttgtcttgcttcctggcagatgagcgtacctctgcagacaatcaggctgttagcacaagtccacctgcaaggggaaggagacgcaaagtcttctcatttttagcctacaatttgacattggacatctcaggtacaaaccgagaggataagatcggggcacaggcaagccaataagagctcactacccaagaatcacctcgggcatacaggaagctgcatcataagggctgtcaaaagtgttgtggtatacccagttggttcttatacacgcatttcctatccaagccgaagcactatttgcaaagaccatttaccctaggtgtcacttcagctgcaggttagtcaagtcaaccgcgcgtattctttatccgctcatatcgtctcctaatatatcacgcacttgtcaggaaatccggattccctacatccctatttcgacttttttttaaaaaaaaaatcatatattcgtcgagcccaccggacacgtgggcatgttactgttcggccaggcagccactgtaaagaatttggtgtccgaaaccagaatgtttatgggacctcttggactagcccctagatcctggagcaattttcccaccgtcaatcaacactcatatgatggttgcttttggaaggatggccggattgtctactacgactacgagcgaactagcactcctgcgggggatatcacctaacggatattcgtttcagacaacactactagaacctaatcgggtttcaatcaggtcttaaccgtgttctcttatcagcagaatatggttgattgtattaacctgggacactgcttcctaaaaggcaattgccgtcacttcgatccgggattggttgaaatatgatccgtcgttgccgaggcatagtaggagccaaccgggtattctggattgcttgcttgtccaaatctctcagcaacatggttgtctctgcggtaaaattacaatgattcttgcgctctctgggatataagagctgaaatagggtaaggtcgagtgactcaatcgccgcctcaagtgatggctttgacttcgcaaggcataaagcctaccgcatggctaattttactcaagccattcgttcggcacctcatcatatgcttctacacgtgggtcttgggcgtattgcttggtcatagttgaaccagtggatctactatccctatcggattgaggctgtatgccaacttcaccgagtgattattacgaaatagaatctatagtgattgatacatttatccatgcgggtgagatggcatgaaaatctccgtactacgtccgtgagacattgatagacctcgccgcgggccatgaggcccatggattcgcactgagttacttccccctgcctatgggcgggcgggcggttgaccgtagccccgtgtcatttaatgggcccatgtgtcgcttaccaataaggacttcagttacatgaaattttataattttataatgtttagctacgcacgtatatgtcctataatgctacgtattcaggttatttgagtagaaagttatacaatggatgtgttcagctataaccaaacctagtaaaagcaatggactatccagtgtaagtgaaattgaaagtgtgatccgaaatacatagaaattgtgatgtatctgtattgcgcgtaaatatatatatgactacaaaacatgctgaacctacaaaaccactcacaatataatgcctaccagcgtatcagtaaatttattataaacacgacatactagttatactgcatactaggattcgcctttattatgatcaattatctgctatactagtggttattgggggtaggtgacaagtgatagatttccaaaagttgaaccccctattcaggaaacttacataatctgagggtggcatggaccgatggcaaggcctagacgttgaccacctttttcaccgcccgaccattcaccaccacgctcaccaccacgctcatcaacactcatcaacacacatcaacacacatcaacactcaccatcaacattcaccatcaacactcaccatcaacactcaccatcaacactcaccatcaacactcaccatcaacactcaccatcaacactcaccatcaacgctaacggttcaacgcaacaagcattcctagacaacacccatctctgtttgcctacatctgaatgaaatatgctaatttctattgtagtgaggaagctattgcatcacaagctaccaagggaaaggaatgtgaaatacgtcatttggtactgaagaagcttcagttgttagtttatgattttggctattgaattggcaaagatctaactagggccccttctatgtatccaatgatgacccttcggaacaacgaacacacgatgaagatgttgtgcaggtctttgcttctccgaatactcttggaacactcgaatactggtccctagcaccacgaagaggtgcctgcacgggctagaggctcttgttgtagcagatgtccctgcgaggcgctttattgacgcagggcctaggctgcggagaaattggtaatgcagcggtctcctgcgggtctcacttgtcatcacagcgtccccctgcgaagttcatttggtaacgcagcgcccccctgcgaggcatattgatcacgcagacctatcctgcgaggattgttgttgacgcagacctatcctgcgaagcactcttttacatacacaggggtcattggctgtgagggagcgcaagtcttacatcgctgggctcgtggcagcgacagccgtggtcatggaggctctcaagcccgtaggcacgagaggggcaccatgacacatcggagtgtgaggaccggagttctgattttttttgggctgggaatccggctccttttatatttttttcggctacgtctctaccaaggaaccagttgcgcagttagtagcgagaaccactgtctcgttattatcgttgaagacatttgaagaacgttgaaatggtgttagcagactttgtggcctacagactcaagtttcaacctggattcattgctttcaaaaacctgcgtttagtatggtgaaccactttttcgactgttgaaaagacagtgataccgcaaggatatgattctcacatatcattgaatttgcaattaaatcgctcaacgctgtggcagactgactactctgcccgttttgaccatggtcactagccacggtcaccgtctttttcatgagggttgaagtgcttcagcaggtgccgcaataatggggtggagactttgtgtacccgtggttggccataagacgtgcctcccattgctccctctacaatcccctttgcctagcctcgcgctaacggtactttctgtatttctcgcaaccaactgatgttgcctctactaatacttctgctacctgtcggtgcagatactatgaagatactcccaaatccagagtattggctgttttcctttgacagagaatcaaaaatcgagacctttttggaaagcctagaatagaaacccgagtctaggttccaggacaatgaagtgagttatttcagctcccatggctcacgagctaggttttcgtgatcgccactccctcgcaagattgcaacgctactatcacacactggcgagaacctggacagaagtaagaccgggtggaccaattaaacaccacacgttaatttagacagacgcaggtacggttctgcgacgcagatcttagcgacgacccacgggatagtagatcaaggaggttctatttgtggcccggagagaaattggaaagaattgccaaggtccagacatgatccacaagcccaaagttttcggccatcagtgcccgatgacacggggcttttttgcttaaggggtgctgctggggcaggtgagtatttggaatatcacactgactttggcgatagagtggcaggctaaaccccgacccgtggttgtgttcttttgtgttctcttggtcgtacggtcgaattcgaaatcagttttaaactctaaactcttgcgactttattcccggaacttgggtggggacacgctaatctaattttagctcttcacctggtaatccttgtagggctgtattgtattctctagtaacaacaatgactcattgttatagtaccgtaatcgctcgtagaacccgatggaatccttcctgcaaactgaccgaacaagagataatcctacactgattttcgaaatccattctaattccgtctctcggcggacatatcttttattttccatgctcccgcattcaagcgtgctagatcccattagtagatcgcgttatgatatctttccgcaggcctccaatttgtccttcgacaattcgtacagttatctgatttctgtacagcttttgtttgtgtcgtatgtcccaatgtcaccaatgtcccatttgtttcccagactttaaatactggaccacgcgatcttaatgttctacggaatatctctgctagtgatacctatattggtaattgaaagcagtcactgaaaaactagctctacttccacctcggagcgctttgcgctcgagggagccatttctgtagtcgagtgttcgtggacacttgcaatcatgatctgtccctcgggaagttgtccgaccacatcgtcatcaaccacgacttttaagcctttgctattgatccagatgatatgagggatgaggcaagggtcgatatgcagtttcgccgcaagttcgactttcaaattgcgagaagtgcggcctgtaaggtatattgcatgataggtgccctcgggttgctttccgcttagggcgaacaggatatagaagcatgcaactgcgaaatagaagtgagcgtagaacgaatttgattttctgtggtacgaaccggattttgaagaatgctttgcaggagatggagaactctttgatgccccaacggaacaatatgggactttgggcggacgttcttgacaaacagggctatgggagtgcacttgtatgttggccttgtttggaatttgagccgctccttctgataccaagtttatagcccctgtgctatgtcgatcgtctaagagcctatccttcatgttaccgcgaagagcaagtacactcactagacgggccgatgaaagaacctcgactgttgtggccagctcagcgcggaggacttccgacgtagggcttttccgaggacttatcgacgacttgcgcttcttgtgagacgggacatcgaattttcggccgtttatcgcactctcgttgtgacatcgactggcaaagttcgcatttgcctctcggtccataattcttttgctgagcttttcagcccttttgcttatacgtatcttatcgttccataatttccgttcggcaccgtggtctctaagtaccttaaccaaagagtaacacctttccggctcgttcataacagacttgtttctgtcgttcgactgtaacatttccgtttttgtacacagcctgactggtaccccttttaccccttttgcgcgagtgaagtcggtcggtacaaaattgaatttcagcagaatcactgcctcataggccttcgcagttggatcagctgtccaaatgacacaaaagtcattgacagaagcttcttcaagctgtacctggcagtgtccctgaattcggaggccgctctgggaaggctcgataaattcgacagctaaaagcttgcctttccgctcattggcttctttcagaccacggccttctttccatagctgccacgatgcaaccggatttgatctctggtcttctccctctaaagacacatacacaaatgtcctgtactcaaagaatcccccgttattcgtgggtggggtcgaatctgccacagtgaggctgtatggttgacctttgttgagatatgttacaggcttttcgttgccaggctggtgcattgccgtcggggcttgcagtgtcgcattgtaacggaacctatgaagagcctcagcaaacaataaatatagcgtgcgttgggcataggcgtacttttctctgtgcccatatatccaatgttcgttgacctgtgccgtgggtgtggccaactcagattttgggtttgattgtccactgcaacgactagtgaaaatatcttgatagacatcatatagcgtagagtatccagaattgtgatgaacgagagttgtcgatataccattcgcctgcccaaaatgtgtatcatcatatggccaaccttgggacttagccaacgaagtgaagcaaggcgcattctgagggtcttgcggattgggttggactggctcatcaagaatgcgcgaaatgtctgtgctccactgactcaacggagagagtatgtctcctacgttattgtataagacagcgtccgaccctgatacattgcgatcgtgaaatgtctcgtacttttccacgtcaatcatcgaagagaacgaatctggtgcatggaaaccgcgatgctttgagtaaccgctctctcgccttgatgtttgatcggtatttgcctcgtctgtgggcgcaacatcaatagggtcgtctccattgacacagctatcagggagcattggatctcccatgtcggtttggacgcctctaatttccctttcagcttgacggctcaagaaacgatcaccatatttctcccgaaactgattaatgaactcatcatatggtctccgcatgatttatagttgtggcgctgggatgccaaaaaaagaaatattaaagcacaaaaaaagaaaaaaaaagcggcattcctaaaagacagagcaaatctgcgttactcccacccttgttgccgtctgcactcagcagaaagatctcagcccagttaccggctccaccgctgtgcgtgttgtactcttgtttctcccggcactggccatgatcaccgtgggtcttcgagcaagacatcttcaagaacccaaactggcaacgggatattaggcactcgagatgtagataatctggctagctatcacgtggttcacaccaagttgaacaaggatatttagaataattttgctcctcaaccttcggagtattgtcggataattgtgaattcctttttcttctatacgaatttataataaactcaagaagatcggtgaaaattgaaatggcgtttaggagacaatgcattggcgatgagtataaagtgtggggcagaaacactttcagtacatcttctatccctttttctttttccggggattcttaacgagacacgataattggtagtgggtagatcatttaacttccataagtaaagggatcaactcgaaggagaaccgtgtgattgctgggagtttcctccgggcccattgtccagttagtctgtgtaaatcctcgtagatggaggtaagccccaccggtacctcgcggccaccaagttttataaccggccttcgctggtggctctacatcctccaactgctctagggtcagcaactcgttctcattcgatctgtcaagcctccttggcccagtttataatgaaattgatacactgctttcaatcgacctgaaaagggtcctcaaagcatatcatggagcatcacacttctctgtcttagcatatattatcggaacaacaactactgctatagcaatcgcgttagaggctatgtggatggtttcccaatggaaaagcattgttggtactcctacggcttcctggtggctaaggctagtaacaatttctctttcatctgtaagaccgacgatagccaaagtcaagagttatatattaatgaaagctcagcttgcctccgttttcctggtatgcgcttccgccaccataacggcaattcacgtgtccattaagtcggccatacaggacagtttacaaagtttgggagcgcatgcaagcttgggtgggcttttggtcgcggcttggtttgtagtactactttccgtttctgcctctttcatgttatggttcacccgacttccctgaattttctgcacccgccaacgctgcactatatcctgaattgaatgtttgcagccaatgaaacgttgttgtagtccaaaacaataaacttagattttctttgttcacacaaatccgagttaattccactgggggagtttggcctctgatctgtacaatactgtacgcagatgatagacgactcattcaccgtagcgcttgaggaatccaagattgggcctcttcgccgcgttgactggtaatggccctggtacaagaatattcggctcacgaaagacggaagctggcgctcaacctttgtatcccccaaataactcatgtttctggatcaacaagcagccattcaggtgttagcgggctacgcatcattccacgaacatcaagaggagtaataggtgaagggtatgcttgaaggctgcaggaattacgttggagttatcaaggaattttctgctccttaccgctttcagaacttccagggtcggtgtatatattcttagagtggactttaaaacaagaaaacaacattgaaggagttgtcttccaacctcttgaggtttatatttccagcgaggcccatagccagacaacagggttccattcacagtagcctgatacctaactgcaaattgtgtggttgccggcaggtccccagtacccttcacttgccaaaaattggtttcgcttgaagcaacggatgcagatcaagtgatagctgcaacagcttttggccagagtagaacgatagtccaagcagtgttggaaagatgccaggtaacgccagaacgcactaatcaaagcctttacagactaaaggagagttgcgcaaatagtggctcaagcctcggtggggtgaggtcatactactgaggtaagggcgccattttaatcctgatgggtgagaccagctggtaccaaaacaattcttattgatggcctcttttacgtttcgtgaaattgccctatttaaagaacatcactgatattgccacacttatgaacgttctccagtcaccgtataaattccagtcaacgcattcactgcgatttgagaaggatattttctgattgagtggccctacgaagaatggaagacctagagcgtgtgggaaaattaattgcattagcactttgggccctagccctcgtcgctattggtatcttgttcggtggatgcacatctacgtcttcattatcacgcttctattttgttatgaccttcatctcgaaggctgagtctaggtgtaatggcaaagagctgtcacggggattcggcacacacgaagattcggggtcgtcgacttcggactagacatgaaccatgtatccattagacttccttcaatctggaagacaaaataatataccgttgtttgtatttctggcgaaattgattcctcgggagccttatctttggctgttccagttccatcagctactgacgctccgggaggttgatctatcaactccgacttgtcgcttcttttcctcttctttttcttcttcttttccgtgctggccatatcgctgtaggttgttggaacgtcctttcctgtctgtttcataagtcgataggacccgcgagtttcatgtggtggagtcgaaggggtttctataatcgcttccttagcctgagaaataggctcggtcgcacctccagcaatcacgagtcgagctttgtaaactaaagcgaccgttaatgatccattctctcagacgttggcgggggctaactcaccatgatcggcagcgtgggcgataaccagattaaggtgctcctcactgtcctcaattccgcaaattgtgaatacctctcgtatctcctgggctgtcaggcccaaaatggctttatccatggcgggagatgatgatggcaaaagactaagactgcgtcttgtcaatgaagacagaaacccttctggaacgatcggggcaacggttgccctctggcttggggggagggaagaatgagccaatcaaatcaaccacaggcgaggctcacaaaaatagcatcaaccaggccaggcaagacttgaccgcgattgacccctctttttgttgtgtctgtgtcggccattccatatcaaaaacaaatcaaaccatacaactatgtaaatggttctttccgtaaccttcaccgtcaggataggtgcaacgcccatctggtatatgacttacgcgcaaggacaggacagagctttagagaatattcgctttcttaggtcttgatctggcaatgttgggaaagacaatcggatcccatcccttgagccagcggagaacccatcggtgggtgcgttcgtcgccaatgaggtcggtgaatttccgggctcggtatttctcagtccacattgcatatgttgctttcttgctcttatggctcatattattcgattcaatggatcgttggacagcagggggcggcggcggcggtcttgaagctttctcctggctttcttgagcagcttcgtcaagaagtttatggatatcaattccgtagtagctcttctgagcccatccgggggcggttgtagatcggccagcaacaagtctctcgtagggaatggcaggtttgctaggtctcgaagcgacattatgcgatttgcccgagcacgttttgatttgaaataccccaggcggctttctcgacggaccgggagattcaacaataggctctcttgcgacaggaggattggccaaaggcgtcgagtcgggcgacttttgcggcggtcctaggataatcggaaactgtgtgggttgcacggtgggttgttcttgaatctcgaattggctcatctgcgcatcgccaaacgcatccaatgcgtcttggtcctcgtcctcgtcctcgtcgtccaggaatcctcccatgattttctgccgcttgggctcggaggattgcggcggttcgtcattctttctcttctgcgggtctgtaggcgaggggggtcctgaggggaagccagcgggcgaagacatgaagggcattttcaccgtgggaggagaggaaggtagtagtggtaataaacgagcaggcgaagagggtatgatgtgttgaaactgtttagatttggttttggttggagtgtctgccaattagtataaaccagttcaagtcttatctgcacaaccaacttaccaggtcttatatcgtcgtcactgcgaaaaacatccgagagattccaggcgcgatgctggatcacaactttatcgcgagtttgttcaatgcgctggatgttcaaagcctcgaggtcgtcggagaaggactctgaggggagatctaggatatcggagtggaggtgtaaggccggatcgaaggaagggggaactgatggagacgaagtcgtcatcaaaggcgtttagagagtcatttctgtcgtggatatggttactggaatagtcaattgtgtctgctgtggttattgtgagtcttgagattgaagttgaatcgcgaatcttggcgcgtcaagacgcgtagaacacgctagtcccgatttgtcattaatgtatactgcagcgacaacgacaacgacatctcgacttctactcaccagactcgtcttaaatatcgacttttgaatagcagatttctcaatctctaaatctctcactatgtcttctcttacgatacatgataatacagccaaaccagtcctataacggagaatctcatttatatcagaatatatcatgaatccagtcccattgaccaattcaacctcaaaccctctggattgagaatacccgggaccgctcaaacatccccgatgaagggaatgtcggtccaatttccatgggcaatatggatgccaaccttggtggcgatcaaagtaactgcgattccatacgatacgtacttggcaatttcagctacaaattcgacttctggctgtgtgtctagaatcgtcgttagttctgcgaatttgcaaaccacatcaatgagagagaacatgcctttgacgaagcgctcaagcgctccgctccaggacccaaggaggagaaatgtatgagttgcaatgtcgagcccactgtcagtgtcattcttccctttccaatgcggcgtcttgatttccaagacactcgttgcgacggaaagagaatagacaatggcttgaaggattgcgtccatcacagcacgaaccttgtctaccaccatcttcgagagcgctgtcacaaaatgcagtaggatgttgaatcccgagttgaacaatgaaacaaaccagccgatcatctgcaacgtataccctggattttccttattcttgggaatgctgtgcaacgtataaattaaaacaacagcatccagaatatgttcaagcgttactttccctccaccactggaccccgacaagtcggcaagagccaccagagatgcagttggtgaaggctgttcgactagaagctcctcatacaagtcagttccagactcaaaggcaagtggcgagatggaatctgggacactgagaactagggatattccaaacgtagctgctcctgtgatggcagcaaatttgttgaaatctgcatctttcgcagattgaccgtctgccatttttttaattatggcagcgtaccgacccctcggaatggccggcagcttatcaccagtcgctagctttgcaatgaccgtggcgggtatggcgataatcaacgccaaagcatcgagaatggtcagctcattcccaggcgagatccacatcttgtagatggaggagaagatggggacgttgattggagtggtgaggagcccattgaacttgttgatgatggttttgatgatattcaaaagcagctcggtcagtttttccaccccgtcgatgcagtcggttagaaacgtcttttcggtctgctcatgggcatatttggcatcgagtgagcgtttcccctggggttgatattcatctaccagcttcttttggcgtgctgtgacttttccatggtatttgtcctcgaagtttttgaattcctgatccaaattcccaattgcctggctttcctctggagttgccatatcggaactgaacacggtctgcagaaacgtggatgcatctcgagcgcctccatgattgaacttggttcgtgtcagcaatcgataaattccccagagatgctgctgcgtacttggtactgtgcccagtttgaggccatagaattatgaattttgctcttagactgatctgttgaccctgttttatcgtctgccttgataccaagcttctccatgtcgtgattgctgggccgactgtctgagactgatttcttcatcgattcaaagagacccttagattttcccttcaaggaatccgtcaaaatgggtccctcttccaaggcatccttgacaatgttcacaatcgagtcttttgtggctgtgatgtccttccagttaaaaacgaatcctaaccaatcgatgatctttttcccaatgtcaagaattttgttgaaaatgacagacaagaccttgcccacttgatcaacagttttcatggcccattgatagactgtctctcctatctggaccagaactttggctccattcacgatgaacgaaatgatcttgtcgccctgtttttccaaccagtgccaggctccctaaaccagatctgttagtgagtcatcaatatcaagaagagactactttctcaaagcatgtccttgaccccgctgccagctccctggattatgtgctcggcattaaatctatagcaggattcgagtgccaccgaagacggggttttcccttgggcgatcgaatctctcgttttcatgagttgatggatgtttcctgccacttgttcaatctgctccggggtcagcttggtaccgtcgagtagcttccctttgccgggacctaaatcgatgttcaaatcttctttgtgttgaattttagacagcttctggttgatcttatgagctggatcaacaaacttttgcgttgattttgtagaggcctttgaagcatcggtgacagtaaacgtgtgtgttgaaatgtcatctgttggcacagtgagagtgagcaggccagtttggtctgtcctgactgatattcctttttcagtggcgagaacactgcgaccattaacaatcacactcgtgtccccagacgctcgcagaatcaccggatgattgaccaaaggaccaccagaggcgttgagtggttttatttgggtcatgtaggactgcatctgaatcgtcttgtccaaggatggctgaataaggggaattgttttccaaatccctgattttgcgtcctgctccaacatggacagattgccaacattgttagcaaagacaaatgtctcacacgaggacgatgttgctttaaacggagcaaagtaacctccctgatgatccgggaccacctgcactgggggatcgggcgattggaaatcgagatccgtcatgagatatccaatgccattgtcagtgttggccgcccacagcgaagcttttgaactagaccttgtgacttggacctccttgactgaagagaagaccccggtatctgcgattttatcggatgaagggtgagccaatccctttgctttgaacctataaagaccagaacctccaacgaggagatcagtgaagccatcggcgttcggtagagctgccagagctcgaggatctaggtctgttaggaatcacactatacgggggtttatgaatctcattaccggatggagttgtgtctgtctgaagtcagttatgtatcgataaacccttcagaagactcaccagaggcttgcttgagaggcacttcaagctcgtgagggacattgatcgagtaaaaggtaatagcttttttgcctggggtactgattaacagagttctacactgaatgctgctctattggggaatattaccttgaatcaagtataaaacggcatgacccgggattatcttggagccatacttcattaccaaaggctgtactgcgatgatcatctccgcattctctggaagcttcacattgtcctttttcatccaggaatagctgtcctcagacctggttacagccgcagacgcaagatcttgagagtggtagttctcttccttgaaagcgaaaacaactggggggtagtttttgccaacggcaggggcctgaaggtcaacattggtataaaatacattgaacaagacttaccatgaaaatgtcaaacaccctggggttatcctcaccacttccagccatgacgaacgacttgagatctaccgacgaggatgaaaggtccacctcacgaggttcaaagggccgaagcaagcatagcaagcttcgagaggcattcgagtcatgcgcaatggccactgcgacatacaacttggacgctgcgtcctggaccacgtcgaacgcatgaccggtgtaggaggatgcaaagcccagcataaggcccagatcacgcacgactcgatttccagacttgtcgagggaggagacgtataatttggagtcggttcccaaggagaagagcatcaattggccatttttatcatggacggccacgaagcgacgggagtttgggacagacacagcggcgacatactgggtcatcaattcggaatcatgctgaatggtttccatggtgttggaggtgcttgaattcttgataaagagggcagtaatggttttgacagatgaatgaattgtgatattggttaagaatagctggatatggcacttttatgtctgaaagttcacatattatttttgaatgtcaatactgatgatgtctaaaggtacttttgcatccaactcgtacagctgtcaacctgggcagaagctgtactcgatgcagatctaaatgaggggatccaacacggaccaatgatattgccttacggtatatcaatccctctagctaagatgttacacaacatggtctgacatttaagactcgttattggggttctgtggctggctgaggataaggagcacatgctacctattttagccgactccacatctccatgcacgataaagtaaatcgggaaatgatatgccatgagtctacgaacataagcggtgaacacagcctttcgagtctcgattcggttacatttgtgggcgctgaaataaatgtctcgtacttcttgaatgtgaaccttacatcactgtctcacttcagctgaagcatccctgctttgggcaatggattcagctggcatgtgttgatacatcacggcgatcatgttcagctgaaggaatacttatcctaggtggcaacatggatttgtatactgctactacacatggtagacagtatgagggatttagagagttgtgcttgacgctgtttgggatgatgaggtaatagtaagtacgatcgatgcatataagacttgcaccttctttccttctcaaccatcaacatccttgaattcacccttggaaatatccccaccagaacagacatggcatcggaaaaagacaaacgcctccagtcgtctctcaagaccgcgactggggctttcgaccaagccgtagcagtgtctcaagacgcgctcaacgatggcctgtactacctgttcgacaagtacgaggacttgcagaagatgaaggtcaacaagaaaaagtttggccggatcgatgcgatgatggatcatgccgaggtgtctctgccggtcaagtcttccagttatcggacgctcgttttttattgcatttttcaaacggggaagcttgttctcacggatgatgatgggtatggatcgatgcaattctgagtgtatgatggcactgacaatggatccagaaatgacaaaaagccaatcgacctggcagactggcggtttgcattcgaggtggactataccaccctcgatgtaccatcggataccaccgagcatcaggaggcgaagaaacagatgaaccagcctggcgactactccatcaagagacttttcttggactttaaaagtgagcgatgaagctgcctattcgtagcaatcactaacactcactagcccacaagatcagaaatttcaacaaggacctgagcgatttcaagggccacaattgggacagtgaagacttgcaaagtttcctctcgctgataactttctggggcgaccctgaaaaaggcgttatgaaggacaagcaaaagtcgacactgggatactttttgacgactgcgaagcccgaaacagtcaatccgcccgcaccgacattcccacccacctccgtgaagcatcagcattacaaatacatcgcacctgggaagcagacacccgacgaaggaccgaaagatggcaagaacaatatgcttttgtacttggagatgacccagaaccgttccttccccagtgaagacatcctggagtattcgggcaatttcgtgactccaggcatgaagggaacaacgtgcatctcccgagacatcttttgggattcgtatcttctccggaacccgtctctcagtggtccctatgggccacagcctcctcttctgcgcgagttcaatcgacatgtctacgcttggcttggggaattccacgtctgggccaagaactattccaccgatctttcatggagctacggatttggacacacccggtgggagccatctcgaagcccagactacttcgcatggaagaaggtctctgcaaataaatgggagtggaagaataaagacaaaaagagcggccatgatgaaggaatatggcctctccgtttggacgcaaaagcgagcagtaagcagtggctttggcattccataatgaatctttctaatgacatcttactaggtgatacgttgaatgaattgaggtttgacccagggagtaacaaaatacatctcgaaggctgctcgaaagtctgggcagaaatgaaaaggagcgatttccagaatatagaagaaaagtgagtgttctgacatatatagcctatccgtacattatgttgatatatgtgatagaggcggtgttgccatcaactgggcgctagatatcactatcgactcagtcagcgaaggagggctgaaactgaacatgaatcttccagccaatcccaaggacattttccacaccactgcactgacaaagccatttgctacagaggccgaagagacgcaggatgaagccgagcccgctgagaatgaacccgctgagtccaccccgaaaacaggaaagactggtaagatcagtgtccatgacatgacagaggcggcgaatgatgcagctgcaaagctggatttcaaaagcgtgacgagcaatctccagactgcgttggagaattcagcgcgttttgttcttcctggaggccggcagttcttctacaacaacgccgtctttggcaataatggggatttgttggtggaggccaagtacaagtcttgatggactgtgagctactatggtgtacccatatctatattcatatagttataaagagtagagtgtccataaaatcaggtatacatctcagctcgatcctctcgcattcatccacagatcccagcccaaagctcctccttccaccctgccagctcaactcaatcatctgctttgcaaagattcgtagatcatcttcatattctccaataaccctctcatccaccatattaccagcagcagcaagtctccgtgctagatccgctgcatctcttaaggccgtgttggcgcccattccagcagtcggtggcatggcatggattgcatccccgagcaacgttactcgtgaggatttccaaataggcaactctgggggtgctgatgagatacgcagagtcgatgtttgtgctctatcctgcttttcgaaaactgctcgcagcgcaggagtccagtgctgtgtcagacggagcgccagatcagccgattcatcgttcttcagacgtagcttatcgctgcgtggatggtccggacgaggactacttgccgtcttgtctcgacggggttgacttccaggtcatcctcccacaacacggccttccttccggcgtcactcagcagcttgctgatgctttggcaactgctcgcgagagtacgaccaccacggagcctttcacggactggcgtgtaagcccagagggactcgtcctgctccgtcgtttgccaccaaattcccgaaaccactggcaagctgttatcggacaagccctaggccgaaacgatgaggaagacggcacttgctgcagtcggtgcgagacttaagtgctgacagtgctcttctaggctttccgaaaacactaggatgtcgtccagataaacgaccactgaatcgccgaggaagtcgcgaagtgtctcattcatcatcgtctggaaggttgctggtgcattacacaacccgaatggcatcacacgccattgatatttgccccagattgtgttgaatgcggtcttctcgaccgcatcttccgagagtctcacttgccagtatcccgatgctaagtcgatcttcgacaagtacttggctttcccaacaatatccagtaggtcttggatacggggaagcgggtagccgttcttggcagtgagttcatttagggcgcggtaatcgatgcacatccgccacgcccctcaggcttcttgacaaatataactgggaatccccatggactcgaagacgtctcgatcagtccacgctccagcaagtccgcgaattgccgcttcaattccgccaatttgtccgccggcaaggggtaagcttgccggttcacgggatctgcgtcccgtgtgtcaatgtaatgttcgtatgacctccttggaggcatctctttgggtagttcttcaggaaacacatcctgatattcctggagcaacttgaggatcctgggttcacttgaagaagcttccggggttgttgccttggccgtacagagtagcatctgtgtctgttggtcgcgaagggcgcgtcggcaatctttcttcgacagcaagttaagactgctgacggatttacgctccaggatgcgcgtatcaatcccatgaacctctgtacgcttatccccaagccacatcttccgttcaggaaagctaacatattggctatgttctttcaggaagtcgttccccagaatcacatcgtacccagcgatatcgatcgcccatactttcttcctcccactccactcgccaagatgcagatttacggcacaactcccttgcgtgcgtaaggtctcaccattagggagggatactggaagggatttctttttgtcccatctcccgccaacgcgctttgcggtggccagcgagacgaatgtgtggcttgctccacaatcaaggagcatccgcgcgacaatggccgtccgcgcttcgggtcgctggaccttacgatcgaagtaggtcagctcatctcccagggcgttcagccgcatagaggcttgctcatccggcaatggtaattctcccacttgcccggcttcaaccctgctggattggatatccatctcgacgtcatcgagtcgaggatcatcactttcttcatcctctaagaggtcttcaacctgaacaggttgggtctccatctcgatatttgccaatcgaggatccttattgctgtcagatccggcgactctatccgcacttgctccgcttccacgtccttatttatccaaagcatgcttcggatcgcccatctgccttccctccaggtggagggaaccagcttccgtactcgcctcaaagaacacgatcgtcgtcctggatgtgggactatgtacatcgtgtctgtgccgccaggaagctgagataccggcgaacagaacgtccacactagcagcatgtcatcgactggagcgctacattgctatgtcgaagaaacagtggccaactatttcgatgatatagtcctggtgtatgctattaccataaaggctgtgcttactcgacaatgaacactcagcacgagagatataaatcactccatggatttcgtataggaaggagcaatcacccttgtttggaattacaacagtagtgagaaagttccaaagtcaaaggtgaacattcgagcatggtcgtggtgcctctgagcaggcccagctacacagtttcgtccttgtcattctaaaccaggggcatggcccatgtggcctgcaaaatattgcggacagtgtataagaattcacggtactatgcgcgttcccatagagagataggacagggtaggaaggggctctggcactgaaattttcttagctcagtaaaatatacctggtggggtttgattgaatcggtggtcgaaaacagtgtgatctgtggagggaagcgtccgatctgctttcgacccacacccgagtcacaaggaaatttaagtttgacacagactgcggaaccacgagcgggactgccgatcagtagcggaaccgcaaatcatttcgaaagctcgtttgggtgaaccatggaaatgcttgcacggtgagagaatgcggctgtaattaagaattcaagcctgggtttctgcctactttctttctgggttgctcgtgattaagccttgcagcccgaaggaaaagagaactagagcagaatcaccacaatctccgtcggctggtatgtaggataaatttatttcggtaaggccaatattttattagagattttcattaaattcagtatcatgatcaagatgtgcagattgattgaaataaagtttagggccgcaggagggccggtccacattgaaatcttgtccggggccaatcggttttagtaaaagggaggcattttatttaagctcatgtggttagtccataaatggcatagttctttacaagccgtctgctagagttattgaaatagcggtagatttgaagagatggagaggaagtgttgttatggcctaaagagagcaataatcatgggggaaaaggcttattgcaggagaagatacgtagcttctagaacgttctacagaccagataggcaaagttctgcttgccacttgacaggggaatttactttctcttcactgcgaccaagtgaacacaaccacggatcgagttgtagcctaccattctgtcgccaaagtctgctgttattccaaatactcgcccgccccagtacctcctaggcaacaaagtcccgttccatcggacactgatggcaaaatctttgggcttgtggatcgtgtctggacctttgcaattctttccaatttctctccgggccacaattagaacctccttgatctactgtcccctgggtcgtcgctgagatctgtatcgcagaaccctacctgcatctgtctgaattcacgcgtggtgtttgattggccggtcgggtgcttttcgtctccagggtctcgtcagtgtaatagtagcgttgcaatcttgcgagggggtggcgatctcgagaacctagctcgtgggcctttactaacagcggccaactttaggcttatagatcgtgtctggacctttgcaattgtttccattttctctccacaaatagaacctccctgatctactatcccgtgggtctccgctaagatctgtatcgcagaaccctacctgtgtctatctaaattctcgcgtggtgtttgattagcccgtcgggtgctatttgtctccagggtctcatcagtgtgatagtagcgttacaatcttgcgagggggtggcgatcacaagagcctagctcgtgggccttagttgtatcagttcacatggttatcctagaaactagacccagtttcttgtctgagcttttcaaaggtctgggccctttgggaagccaggagatgcgaccccggacaaaatctcggagggaagtgaggttgcgaagaggataaccgaccctttggcatagatactggaggagaatagagagaaggagtcagcccatgatgcgacacatgaatctcaagataatacgaggcacccatctacataccccgtgaatatttgaagagccctataccggcctaggcatccatcgaccaggatggaggtcggtagcgggagaatattcaccagcacggtgaacgccagattcaccatagtcgctcgagatttgcctagacccattgctcccgggactaagtcattcggtctattctgcagatagttttctggggttgtgtttcgtcagcggaggcagtgcccatggcgctgagacttggagagcatatactgacgaaaaagagtttgcgttccatagtatgagaatcgcgcggccattcctatagtggccgccaaccagactcgcatgggaagaggctctgacacatgcgtaagttacaaatctcgtcgtcggacgccagactgccccctggagcgggggccgtaaccccagactcaattttaacttcaacctttcctacggctcatccatggcggggtttcttttgttttggaaaccctggacgtgagtttgtttcagggattaaggagattggaaatccgaatataggcaagagagcaagatcggtgctagctcgatgaaggtttatcggcatgatatcggagtcgaagccggagttcggagtattgacacatcatcgatgccgagaaagctccgtaaaatgacgaggagagatttaacttccagacactctgactggtatccatttcaaggagaggaaagctgtaacgtatcagcaccaaatcccagcgacaatgcctcatgaagtgtgtatattgattgatgacactcaaaatggtagtgtaaactcttctcccgatgagccactagaactctgtgcctgacatttcacagtccacgtggagattgtagctaccagtcttgagccgctgcaaaggggagacataaatgagtgcagtgtgctaacggctttggtgcagcctttgagacgggaggtaatcgataaaatccgaggcttgtttccaattacccgatcaatgctggtgatggatgccggctcggacacacccgtcaaggccacactggacccagccaatattagctccatctgcacatgtgtgggcgatcaaaaaggccagcaaaccgtcctttttatcatcgccaaccgagaagggtatgtggttcgcagtgacctattccaggatcgactgcgcggttgcccagggatccagaaggtggtcagcctcgtcagcccccggcaattcgtcggttttcttccagccacggcccatggtttggcaaaactcgtcgggttggccgtttgctgcatcctggccgatggtatggacgcagcctcctattgacagctgtcagatcacatgcaattgcggctgcgagagaggctctcattgcagtgacagtcaccggcgacaattcccctacacaggcttgccgtggtcggtgaggtccgcccggctcatctctcttcgcgattcttccaggccgctcgagccttgggggtcgagttagtagccctagggccccgcggccattggctacaggatccagaatcgcggaacgacccagaccgagaagtctttattgaattggatctgacggtggatcctggccttccgcatcggattgtgactactattcaagactacgctggcgaaatcgatggactaagtacagtgactgaatatcttcttatacctgtcgcgcaagccgccgagcgactgggtctccccacctcaccatccatgtcgtttagcaagtccgtcaataagtaccagacgcgcttagaggacagcccgagctcctgccgtctggtctcgggtctggatgcttttcaatctcagctagcatatgaggaggaaggaatacttcctccgggcccgccgtggattgtcaagccctgcaatggctggcattgtctaggggccaccaaggtagccacgaaggaggggctagtggcggctgtggagagagtcgccaaatatgccgcctacagccgagatggaccaaatgcagaagatcctcaatggcagaccaacgtgttgattgaggagtactgcgatggactggaagtcgactgtaatttcgtcctatgggacggtcagatcctcttcttcgaggtgattggtaactttccgtgtgccggtgacaccgtggcagagggcatgcaaaccacggagaatttcaaagaaacacagctagtgttttcctcggctctgccaccatcggagctgtacacgctgaaatcctctctttacgacgctattacgcgtctgggcttccgctccggggtcttccatgtcgaggctcgggtgggtgattcgagtaatcggtaccgagccgcggaagacgacgagacgctggacttgcgtcccagaccgaagcctgcggcacgccgtgcgacagtcttcctgattgagaccaacgccagacctccaggctatgtggatacctgcgccagttactatgcaaatggggttgatctgtttgcgctccaaatcctgatcgcactcggagacgaatcaggtcacgagccttgtcccagccattccattctcgtccccacgttgtggtctcagcgatccaagcaacaaaggccgggattatcgcgtcggaagacccttggaaagatattgtccagaagaatcccacgttgatgcgcagtgtggtgcatcatgtcatgagttttggcgagggtcatcggatccagaatccgcggttagacactacaccatggctttcagcgtttactacatactcactaaagaatcgtgcggacgcattgagattatgttcacaggttaagagagagtctgagtgtgaaattgtttaggtagactgagccttgcttatttgcgcccttccattgcgaaccctccaaagtaaaacaaagttcttcgaaagtcttaaatcttctttaacgaggtcatcttcgtttctttcaacactgcatttgaccaaaagatgccccaaaatctgtattctggagcagttgaatcccatccatatccaaggaaaaaaagcctatcgaagtcgacgtcgaagttgcgctcagaatctctataaggcgcgggaatcttcaaccgcggctccaggatctcatctagaatacgagtgaaaacagctgcagtccggttaaagtaagtagagctttcctgttcaggacgggccgtgagctccagatgcgagatgaacacactcaggttgcgaatgagagacgcttgggatcccgagtagagcatcggccggcctgtctgggcctgtttttgcaatgctcgaattaatacgctggcgcctggaatcccataaagaagaagctagccagactcgtacgttagtgtaagtaaatatccacgggtttgaaagagacgctcactatccaggtgaggtcgcgttgaatggcaaccgattgctcccactgtcggcccaagatcaagacggtggagagtatcgttgcactcagtcaaggtgggaggcacccgtttctcctgagtccttgctcaaaaggctctggaccagtaactcattatataggtaggccaagtaagagatgagaagcatcaatttcacactggcaggcagatctgttccccagcactctagtgtgtaatgaagatgctcgggcagcgaaatccaggcttcattgtagcgacgagatacagtcctaacaggcagtcgatgagtatgacaacacaaccgcttgtgctcggacatcggtagtaaacttacatcaatagatcggtccgttccgggcttgacttctgcaaagaaagctccgagttttcttctcgaaatgtgccgacgatgaatcacaatcgtatccaggtcgctctttggtaagcctttcccatattccacccctggggatccagggaggtctgagcagcatccagaatctcggggtctcctgttagtacatgatcgccaatgtcgagcgggagacaacaatctgagtgtcgccatgaaatttgtggcggacgtccaagaaaggtcgcaatacctttatcgaattgataggcggccgcgaagagccttcgtcgagattctagaatgaagagcggcagtgccgtcgagctagtcgtgtctctatgcacgcccaattcaaatatattcgtcgcgaactcaccaagacgctgccaggtgatcgaacctagaataagctccccgtcagtggtgactgcctttgagcggaatccgaaaatgggacccactggaatcactgaacaataaactcgtccgcaactcttacttttccgccctccagccataatggaaagttactcttgaccagaatagccattccctacgtttaacccatagcatgttcgcgttcccgctcgtcaaagatacgggggcgttactaaatgcgcgctggcattggacgacgcgcgtgaactgctggatctgttgctcggtggccgatgggccatgcggtgtcctacgaccactacgattgaccggtgcgacccagcaatgccggtcacgccagtgcttacgtatagtcctagctttcctagcgataaatcgataatactgggtcttctcacataaaatgtaatctagatgaatcggtaaattggcgatcgggctcgttaccgcggtcggagcttgccattcgttacattgttccgtacggtcccaacgttggatgatatcgccgattcggccggcgtatgtaaatgacctttcgtggttttgcattagaagccttgaacccgattgggtcccagacataaatcgacgttgtggcccggcccatctgcggccactaaagtctaactatttcaagcactttacgcatcttaaccaagacgctcaaaataggaaatctttctagatttccgctcttttacggtatcctttatattaataggccgagattgcggtgattttgccccgattctcgtgacttttctcgtgagctactatagaggcttaatcacgagcaaccaagaaagcaagtggggcagaagcctgtagataaactttcgattatgttcgagcccaaaaccttcataacaaccgcattcttttccgatcaggcggttccatagctcatcgaaactcatttgcgaaagatttagaggttaactactaatcggcggaatcatagttccccggtatttgtgaagttaacttttccctacaacttaagtcaaagggtcctatcattattatttggcaggggaaaactatgcatcacgccaaacattggtagtgcatgcatcgaaaatcaactgcaagcctcaaccttaacactagagagaacttttcttccgacccacccatccaattctgtctaattcccccgccgccttcaccattagcaatactgtacgcatctaattcgcgttccctaaccaaatctcgttttgtttcgttttatacgcgttattcttgctacttgtttgcgatccttcagaatgtctgacttacagttgagagaggattcgaaccaccgtggatcgcgtcccaatccaccacctccgactggcccgcaacaccctccccaacctccgtccccagggcttcaaaccgcttaacgaccccttcccgatcacccttacccatctcctgaatcaccttaatcttgacctgcaaacgcccaactcgaatctcaataccgataatattcttcttcagcatttcaacttaagagtctggcgcctcgggccccgtcctcccctctcttcccttcggggttagactccagtcacctcgatgcctccttgtggtgccaggaggatggcatcaatctttctctttctgtagggcaacaccgaacaaggccgatcaattccaggcaaaaagagtcggaaggtccagggtcttcggagtatcggcgttcgaccccgccgaaaacgccagtctggaatgcgacctggctagtcatcgaccctacgagaagacatagagagtggacatatagtacacagtttgttttacattcagacaaggagaaagagactggaacgaaaagaaatccggttgttgcttagcgctaaaagatagtgtaacttcgaccttttcgaacctttcactcgaaatctcccaagctaaaaaaacaccccatctaactagaatctcagattgatatcagcgccgcattcgaccaacgcctcgaccatcgaagcgtgcccgttttgaactgcaaggtgcatggcggtcagcccgtgtccatccgccatggacaccgtcgccgccgcaccatgcatgagcaacaagcgtcctacccttgcgtatcccagagcggcagccacgtgaagaggcgtgcgtccgtcgttatcctgagcttttacgtctgcaacatgagccagcaacaccgaaactatatcttcgctattcataatcacgccctgatgcaacaaagttcggccgaaagcctgcccattgcatgccctagcgttcgattcaatctccgatgacggggagaggaggttcggatcaagcggaaacgacgtgtctgaaggagggacggcctttgttcacagattggtttttcgtaaattcagaagacgagggaagagagagacaagggaagggtaattaccactgaaaagtgctcctcgactcgagagctcactgttgaagagtctccatcgtgtactgttgacggggaactgtataccctcttggcatatcctgccgagggaaggaaccggtgagagagaggatcattaggttccgtggacggtgggtctatcggttgatcgacttcgacttctggaaaaaggcttggtaatatcgattgagggtgcatacaagggtttacaccggctgatggcaatgggcaaaatttttgttggccggaccgtaggtctgccaaatgtgttgaggggttggtgtcatttcctgggtgttgaagactttgtcgcagccgatcatacttttccaattgctgcttgacagactcacctgcagatcccagatgaggtttgctaacgaggtgaaatggagccaagagcgaaaataacaggagaactcacgatgtttacgctgtgcctgccgattgcgttcccgtcgctggtcttccttggacatttgaacaaggacccgcctcgctggacggatcggtgtttgagggtatccagacccaggaagatcagggaatttggatgagggcatcgccattatcactcgagtggtggcttctttattcgaatatgaccggaatgattcctatgctgtccggcgcggatggccgagcaatgacgagaacaaacagtggttagcactttcctgggcttaagtcgggagaaacctgttcttagaaggattttatggtatgtcctaacagccgagggccttgtgctgcggccgccttgctagattctccaggcgtggtgctattggagcatctaatacccacttcattaacaagcaccgttacttccactcgacgagatgaattctttccaaggagatatgggtgggagcctcggtgtacgaagccaaagtacaggaaccatcggtaaatggtacctttttttacccgggtaggcatggactatcgccccgttgtccgatccgcgcagaggttagtaccccatccaccaacagccctacgatggaaaatgcaaaatctgaccgatctggtgtgatacgacgtcacaaaccaggaactgatgaggggtcaacatcttagctaaccaattatagactagccccatctttcacgtgcgggctattgggggcgggcaattatgccggtgcaagtgcgacgtgctttttgttaattgcccttgcggccgcagcttttcgccatccgaaggccagaatcgtaagtcacgctttgaccaagaatttgtctcgtgaatatttactgtgttactgtgtcttggtcctagagcatagacaaaatataatgttacatttgatgtgaggttagtcatgttactctccaacatctggccccataatgcgggtccccaattgtagttggtgccccgcgcgatcaccctttaggttcaccatgggtcggagacccaaatactcacgcaatattccctagtatggtcacacgcatttcaacggcatatccttgcatcctctgagacaaggctagaaccaccttcggataggaaagttgcgaaaacctgttcgcgccagtctcatctgtctaccattttcgatatcaacatcagcccatctcctaacactcggagaggcctacctacctagatacctaggaactacatcccgtagttcgaaactaccaatgaacaactacaaccctgccagtttatctgtctgataaatgttcgaataactatcgcgctcggattttcttttggcaattgcgcccatagcgggtaacaaaatctcgggttcagtttagttctaccaatcaagaagctcaattctcaaccgcacgcgatgtaaccggaccctggcttagacctgaattctttccttggtaattatcttctccaggaatccttgacttgctcgtgcttcggttgaggcgttcctggcccccagaaaaatacacaatggatggatgacgtcatttaccctaacccctcgcagaataacgtgatatgtgagaatacaatggacttttgatcctcacgccttgtttctcggtccatacttggaaagatgctaattcatgttgagatacacagtaaataatccttatctactgtataaatagatctttatcaattttggaacgaccgctttaggtttaatactgtatacactgtataaggaactcctatccaccgctagctcagcgccccccagtcttctcatcactaatatccaacagctattagagtctctgcggaatacggatatttcatcccaacctaacgctactttttattcgcgatatgatagaaagcctgtcactattgcacccacgtcttgaaaggctgacacggctggatataggaacggaactaattcaataatctgcaaaaaaagccctaggtacatatatttgccttggctcgtatgacaaaaaaaggagcataaatgcttcaaaccttgataaactggaacgaaacagggtttccgttcagaggcttgcagtccgttccggtctggtcttgatcaggattgaaggtgtcgacctcttggccggcggggcaatcagccgcaccatagaaaacaagcatgccgtcagcatctagagccaaaagctggagtccagcaccgccgttgccgagaccattgtggcaatcttcgtcatcaccagagtaagggatagcctcgccggtacattgaccattctgatagactgcgatgcggtaatcatttccagctcgagtattcaaggcattggtgttgttgcgctgttcgacgttcggaatagacgctccttgcaccagggcggcgcttaggaagaagccgagggctaggttctggaatgatcccgagtacatcctggtttgcagatttgactgacgataaacggcactccaagagggtgacgctggttgatatgggcgtaagcggttctgagacgttgagaccactgatcggagttgtcgagatcgagactttggaaatcctcgatacgcacacgaaaatcgtgatttgaatcaggtactggggtcaagtacaagatgtcgtattctgtgtcgtttcgatgctcgaggatatcttgttggatacgatcaacaaaccggacgtcgagcgttccagcgatctgcctttgcattttgtgtgagacggaaattgaataaattgaatatgaagacaggtagtcgaaagattccgagagtagatgcaacggggatggggcaaccgtttaatgtttgatgctaggggcggtggtggcaaatgtgacgataaggcataattccaggaaacttacctacttgctcagagtatgattgaccttaatgaacatgaatgcgccaacaagaccatgaacattgacgctcttatacccgaacatgtcgttccttcgatggcagaccgactgcacagtcatacgctagtcagcatgaagattaaagcagacattgtacattcctgcttgaatgcccagcttgcaataggctgctaatccgaagcactagaccacagcgggacggtgttcaccggtacactcgttatgatcaggttataaacgacgtcgatgactgtgcatgataatgacatcataacaagttgttccacagcaaagctctcgatcattgcgtggtccgcaaattcccctctgtattcctgataacatcattctttgacggccttgagtcgaggacattggagttgcctagaagctattatcggttttactcaggggaccggtggggcaactcagcctcgtgccccgatgtaaagtctaaccaagctgagatgaccacccgggggaggagggggggcgcggcgggcgcggagagagcacggttcttggcccgtgactggaccccgtaatggaactgcgcagtacggttggcgtaataacgtaattggccaactttcataggcttgagcgagcctttcatgccaaatctagttagtcaactggagagacttcctatgtagcggaaatcctctgctgagtgggtctgatcagggcggatcatggtttctctttcccagagcataggatactgcacgtgatctggtgacagatctgtcggttggctctcggtggcccactgtgttcccggtgggtcgccatcgattggtgacgggtaggtccgtaataaccagctcaacggttggcggtccaatattgattttaacgaccgctattcaccccgttttactgtcggcatttgccgtagacctataatactaggttggatttaatcttatcgatgcctagaggttggtggtcctaagctgcccggatcccgggcagcccgggatccgggtcaacgcgctgacctcccacgagccccgactcatcgtaccaatcatcatcggagcagcccgcatgtttcaacctttcaagtaagagaattgtaactacttataatggattttagcaacttggagcatattgctgtccgtgcgttgctctaagaataacccgtaaaggtaccgggctccctcttcgttttccgtcttcgaaattgcttgatgttctactatgccacctaagagtctacaactttattgacacttatttggtcacggaactcaaggacctggcatttaagaagttcacagcggttgtgataaacttaggaaagccaaaaaatctggataagcagctcgcggttattgattgtttatcgttagcatttccgaagtcgtccctccacgataagcttcctagatagctaggtcagtacgctgcttagcgcctagacaatttacgtctttagaccaagtttcataaattgcttcaggtatttctatcactaagctatcgtataatagacactttgaacccagctaataaggctccttagaatatcaaatgccctaaatactatatccctcctacgatactcgcacttgttttaaggggaaccactactaagataagggaaagagggagagtagaggagggcattacaacccttattatttcccgcgttttcttttatctactttttggactagcccgaatagctctaggatatatatataatgatttggtgaatacacagaagccgctataagtaacttaactcgtctaccgtatttataccttatagcaaatcctttatcttccatttatccctacctagctatcatccgatattagatagcttgattaccctatctactctcaccaaggagaaaactcgttccgtctcgagcgctttataaggctcggatctataaaataaatgacttcacggtatctaggtttctagagcggagtttaaccatagtgtagagcagtgcttaatacaatatagacgactcgatactataagtctgcccaccaattgcggtttttatatcagctgttagatatccaggactgactagagcgtgtagaatccacgctggctggaaagcctcgtcgaaaccgtacgtaagatctgcgtcttcgccgtctgacttatcgacttggaggaactgtttggccttttccaaaagtaaagacactactttctgtcccagcctttccgacgtagttcaagcgctgtaacatgaagcttttcaactaggaaagagggccatgatcaagctcgttcccccatacagtagttcctctctgcactggatggtccttgtacttggccttgactgctcccgatcgatcaaagatatggaaggccacatcgcacgtttcctcgttgggctcttccatcctttcccagaattcagagcgtatatcctctcgataaatataccgggctagagcgttggcgacagtgataccatcgcaagtgcatttagcgacaaagttttttatccacttgaaatcgtccattccctcatctgtcaaaaagagccgaatctttagagttcgtgccttattaccggagatggtgtactcgtgctcttcaatgtcctgttcacgatccaaacattcgctctcatcttcgctccaccattcttcttcctcggagttatcgaatccatggtactcaagagtcatcttctgtcaattcatcgtatctggtttctatccctgattgtcaaagcaatatcagtatagctcacatctcttatgtgttagtgggatgggaaggtgagcgcactgagggatcctcggtccctttccattttctccccagtattttccattcttcttatcaaccttggtccctggcctaattttggggcgagatttatgaggtaggagaagaaaggcaggcgggcggcgagacaaaaagtgggatcagccaacaagggagggaatcttctacagttgtacttagtaacgcggtcgtaaaaggtgacttgaccatggattccaaactcatgtcgaaagacttcatcatctcgcaacgccttgataaccatttcaacaaaattatccaccgtgtctcgctcaaaatttcgaagggacgcttccgaataaatcggcctgttctggatattcgtaacgacataatctatttgggtatcagaagggaagagggggcgcgaggtaaaggcagccgtgcggtcgaatttcctccagacttgctcctggagctgagggaaatcaagccaatggactatgcgcttggggtaaagtctgttcactgggtcggtcgcatcgccctgagtcgtgacggtcgcatccgtctcaactcggatcgcttgagatagagtgtttggttggagtcgccgttcagcctctccctggaggcgctctgcttcttctcgcgcctttctctcttttcctagcgcctgtctctcctcctcaagttgacgtcgtagctccgcgattgtttcttccatcgcttgttgaaatcactatacagcagataatcgactgatgcaaatggaagtcaatatagtaggggttcgctgtctggcggcggggagtggcccgtcagggcggaatgcgtccagatgtttaccagcttactcacccccttggctcgagtcgattcatgcctcaggcacggatgacatcaacatgcttttggtctttcggtaggctgacgctcagaggtccttttgtttcgtcgtatagagtactagtgaaagttctcccgtctcgtccgagggctcggaatggagaggaggtggttcttgcaggttgaaatcatttcttgccagagactgggggtgcgagggtattatggaatgcacggatctgcgctttaggtggggaaggggctctcaactagccaatttttttagtcctgctcggatatgggcttcgtccccactactacggaggtgaacccgatcgctagaacctcggctccatcttcacctagcaccattcggaagcccaacagtcagcggccaacaacgaccgccacccagcttaataacgcgcggaaggtcagacaatcacccattattcgggcgcagcgcaaacgcagcactttggctaccatttcggaggaattctacaatagccttacccaggggatcaactccacaaagccgcaaaatcaggatatccgctccctctaggtcagcagcaataagggttctggctaggactcggtgtcccccgagccattatcagaaccgatgatgccccctcctactcttcctccccctcggatctctcctgtaattgctccccatgttaaagattcttcgcctagcactgcggccacccctgcgcttttgatacgcatacagcggaatcaacattcgcaagaccccgtaggccagttccgcggtcaagcacagctcgcggggcctgagtgcccagatggagtaatggaagatataccacttatagaggcggccgctcctttgcagctgcgtccgaaacccaaccgtatcgataccgctgtacggaatccgtcggtctctacaaatgggacacctttcttggatccttcgtctgcgacgtacgataaacctcccagtgcctctctagctcctagtccccgcacagatgcaataccgccttccagtgggccggttcctcgaaaatcagaatccagaactgcgtctaatcggaaacgagccagtatgagttccactcaggctagtccacagttacggcccaagattagtcccagcatccagccccttataaaaggcagcgatggtgagtcttgaatccgaattgaattccatggctgttgtactaactatatactagacatgtcataggatatgctttacctagcatcgaaatctaactatcaacacattctcaatggcactctgccatcgggcgtgagctgcccagaggccctagcagagaaatctgagctcaaagcggacgaatcacaagctcgcatagcagggacgccggaatcgaatcaacaatacgctcaagaaggttgagcttctcgttccgcaggagtttatcgatgaccgcaatgctaaggaagctgcagaagcctgtagaaaggtcaacgagaaggaaaaagagaaagaaaaggctaaccaggccatcagcaaggccacccctgtggagatagccattgattacatcaaggccccgaaaaaaaacttagacacaaccactgctaagttggctgccgtcgaggccaagttttcgggcgagccctctacggagagctcaacctcaacttccgcttaacctgaggagactccgaaaggtgtcgccaactctgaaacgaagagttcggcgtgatcggactatattaccttaataagaccagatcttctgcttgcccgcatagtgatgcaatctatgcaacggtggaagatcgaaaaacgggatattccctttccggggtggaggtttcgcgcaattgtgttatggatccatgatctaatggggttttctttctgtttatttttataacgtgatttgatagcgccggtgtttgaactacgagggtggctcatttttgcttgtactagttctatttttactatgtctacctacttgataaccactgccagttcttcaattttcctttcttatcttcatcttagatcgattttagatgcatgaccctagtatttgcttatcatcatgttccatttaagatcgtgcccatgaagtcaattgactgtatgcggaatcagaatcgggagtttgcgtctgctccgtactcaattaataacctgacaaaaggagctttttggttctgcaccgccagatgaataggcgtcaacccatctttatctgtcgaggagatcgtcctatccgccccgtttgacagcagcatattcccagactctacatgaccagcaagggcagcgtagtgtagtggagtctgaccatttctatcttgtgcttgcacatcagcgccgtgtttcagcagggtggaaatcagctttccgttatcaaggagcacggcttgatgaaggagggaactgccagaaagtgactgctttcgaaccgatagagagctttcaactagctctgttcgatcggtgcagttatctgaaggagaagccttaggtagtgttaatagttggtctagcaatttggtggattttaccctcactctctgatgtgtcttgtgcggaccatgaccggttaccgagaacggaagactatacccccacggggtgagctccgatcccatgtcgagctccaaaggaaagtatgcttcgttgtttggaggggatatatgaggttttgcgggtgtgactgtgacttccggaggaatgccgcacgggcttgggagcagatctctcgttgtgagaacatttgggccttcggcgtgagagccgccaacattcaagcttttactttgtttcgtgaccctgagcccttcttgtatgttggcattttgaagaagatattcatcttgtcgcaagcggtgtttgacggattctcctacggaaagacgaaatcgattagttatattttgatatgaataaacgcgtatgtgttaacagaactatacgatgcatagaagagtgacttaattttaggtattctcacggtagttccgctgtgatacgcaatttttcgcgcgccgttgctcttctgtgaggtcccgaaccgatgtgtgaggccctttagtaatttttccacgaggatgatgcatcgtgtttttcgctcagaattgtaaagctgctatggtaaaaactgacttataaaaccccaatgcgatgaatgcgctcgtggtaaaagaaaagggttgcatcctgttattcttctggggcggctgagcaaggtcttagcgaaaagcatgtgctagtcaagttgggagtagttgcttctttttctctagtgccattaatctgcgggaaaatatagatcccctcagagaataaaaagggctaagctgggatttgggttacattgcagggattgagccgtcttgattgctgaaacagtgcccctctactccaacttgagccggacattttcaagacaggtccacaagctgccagttataagatggttattcaagcatcttttagacagtaagtaaacagataagatcgtgttgtctcgaacaaaggtaattcgtagaagactagttgcttggccatcattacacggtttgtgtggcaagtatcataccatattggtcgggtctcacccctggtggataaaattcagtttggctcggggggcgaaaaaggtaccaagagcggataccaatatagttaaggcatgtactttggctccgaggggacaatcaagtgtgcttccgagtggacttgcatcgaccagaatttgtgagaattcgcatgcctgttctgtcatgtcctattgcgataggctcttggtgcctaggctcctatccctccttaaggactcatcgcgttgggtgaatgtaactaaaggtgtcaataaagtgagtactgtactgggtgatgctccaataacacccgctcctggagaatctagcaagggagccacagcaacgaggcgtcagcggccagaatcatacacgtacaattccactaatcaccaaattccccgccttgacccgccgggaaagcgatagccacttgttcccctcatcattgctcggtcatttgcgccgggaagatgatcgttgccgataatgtgcctaggtataaatagtataaatagtataaatggtataacctaccctaacagacaaagattcaggagcagcactggatccgttctggtgataatcgaacaaagggagcctctactagagtgataaccgtgatgcattcgtccaggttcccagaccttccggggtctggatacccacagatgtcgaccttagcgagggagatccctatccaattgtccaagaaagaccaacaacgagaacgcaatcgacaagcacagcgtaagcatcgtgagttcttcttcttttcgacttttcgtgaaagagacctcatcgagaatctctaggtgaatctgtcaagcagcagttggaaaagtttgatcggctacgacaatgtctccaagacctagatagtggccctaaagcctcgaaggatctggcaaacctaccgttagatgaacagcaaaattgcccgtcgccatcggctggtgaaaattcctctatacccgttcaatcgatattaccaagcgtcttaccggaagtcgatgagcccataaactcacagtgcagagacccaattaatatactcactcgcccattcattgcctcaactggatataccaatggattgtgcagtcaactatcaaaatcacacgatggagactcttcgctagcgagctctcgagtcgaggagcactatttaatggtaagcccccttcccttctccctcttttcccacaacttctgatttcactagaaggctgatttgatttaaaaaaaggctttccctccaccagatacatcgttttcgctggacccaaaccactgccctccgctagagttagaatcgaacaccagggcatgcaattggcgggctcccggtcggactttgttgcaccagggcgtgtttatggatagcgaagacatagttttggtgttgctggctcaggttgcagatgtggaagctcgggaccatgacggacggacacctcttcacctggctgccgctctaggacacgcaaggatagggcgtttgttgctcatgcatggtgctgcggcgacgctgtccctggaggatagacatggactgaccgccatgcatcttgcggttcagaacggccatgcgccgatagttgaggatttggtagagttcggcgctgatgtcaatttgcaattctaagtagatggtagtgtgagggattcggagtgggaagttcaaaaacagtcgaagttgaatgataatttagcatcgagcgacaatcaggtttctttccatcttgcctctgatgtatcgcccggtcacaaattcctatttccgcagataaactcaagttgctcactatgactcggacgaaagaacttgttgacttgtctcaatatatgtatttctcgctccatatttggatctagttatgtagctgcgcagtcaaggctggtagagtataacaggattcttggggatcagctatccacaatgcattatcgcggttgcttgcctgggttcaggtagatgcagacttaaggagttcttgtaccatgtgtatgtaggttgtattattgatggagttatgtgggtcacgacccagtattacatatagatacaggtctaaccctaatgcatgagtagtgcgtatcagggtgacaggacaataccatcggtacaggggatccaacaggagtctagttataatcgcggattggaagaacgttgatccagtacttcacaacaccgagaatccccttggcattggcacccaccaccttcacatatttggctttgcctttgagaccatcaatacgagcgccctggtagtgaaaacaaaagacattattgattgaaagaaagagggggcgaacagataagcgcatgagttgcataacatcaagaaatgtctccggtttcaaatatacaagtcttgtccctgctaataccgtgacaggcattctcggcgtcggaacggaaagcttgcttcctgtgagccttgccgcaaagataaagtgcggtgcgaccatgcccagcctgtgtgtaaacgttgccagaaacggggattcaccggtcggtgtttctaccatcctgcaccgttgaccagcaccagaagacaaccagatagggatggtcaaattcacttgtatgtccgcaattgcccgcagtaggaatatcaactgagcgcaaaaaaatttataggtcaccttcgccttccttgggaaacctgggcaaccccatgtctgactctgaaacgcttgacgctgtggcaccatgcccgtctgttatccagccagcacttcgaactgaacagatgctgccagcagggtacttgggtccgacaagcttcatcgcggggcttgaggagagcgttgatctttttacccatggtgaacaatccaatacagatggacgagagaattcagccatagctccatctcccgcgttagtcaagaggaccgcagaggttcttcgctgcttgcaacatttccctgctattaaaaacctggtccataaatactacagcgtctctcaaaccgctgtcatcccgtcaccatttatcctcaacgcgctggacgagctggaggtcactgttaacggaagcttgtttgggtcagcgtccgatgaacgactgtttacattcagcacattcgtaacacacaatactagcaaggccttgcagatcccacagaatagcgacgggacagtgtttcacaaatattttactggaccttttcttcgcttggagatcattggagttatatgcgctctagcaggccgggccagctacttcgggctagccgacagtacggttggcgataccgagtcaccaacccaattctctcgcaaaatgttggttatatgtgatctcactatacatatatgcaagagtctaacggctttgaatgatctttctctctggcttgtccacgaaaacctcctcttgtcgaagctgcttcggggtgattctagtcagtcatatttactaaccctacacgaatcccaccgctgacgagatgttctacaggttcagtgacatggaaccgcctaggtgaacttgccacgggtatatttgagtttggtgcgcatagggacacccctagcttagtaccgcttttcattcttgaatcccgacggcggctctttgcagcttcctatcagctcgataaaagtattgcgactttccttggacgaccgcctcgcatttcatggaggcactctgattgccttcttcctcttgatatcagcgatgaggatttagctggtcacccccatacactggaggctgcccggcgctctttagatgctaatggatggaatataaaaaaagtctatcagccagcatcttggatacgactacgatttattatcagtacattccgagaagagattctggagctgtcccttcaaaagttaagtccgaatagaacggaaaaattgcggtaggttgaagtcgatgtctgcctggagtcatttttgtctacttgatgctgattattagtactagtgaggtttccagtcgctgccaccaggcttggggtttgttacctgaacatctccaatatacctctagttgttgggagtccgaccttcctataggagtgaagttgatatcgatcatttcttatatcgcctatctttacaatgagttctcaatccagagcctattgtaccaggattctaaaagaacggattctgcgctactagacgtcagctctgaaatcctctccactatattgaccctgggccgacagtgggagcgatctgttgacatcaagggtgacttcacttggatcgtgagtagattttggctacctaatggatctcaacttatcttcttttttaggctcttgtttatgggttttcatgcgccggggttttgatccgagcaatgcaggagcaagctcgaacgggccagccattattgtattctggatctcgatcctccctcattcgcaacctaagcgtctttatctcgcacctagagtccatggccggtccggaacaggcgacatctccattgttcatccgtgcaacgtcggtcttctcgagtattatcgatggaatattggagccgagacgagaagttcccgtcaacagtactaaccccgatactatattgaattctgatattgaaacgcccttcctttttgatcttcaggggatggacttgtttgagactcaagattttcgagttgcctttgatgatatgctttactaaagaaggctgtgagctcctagcaacccatttagagacttttgcaatttcctacaaacagccactttgctctcaaattcattatgttttcttcgcagagtcttcagcgagatgcccttcgcttcactctgacactgtcaggtgatgattaggaccaggagttataaataaactatatataactgtaacctcaacaatttctttattaattctttcatcaatttatctactttgttaccatgccaggcaccataccaagcgatagaaggcaccgagtcccttagacgtggacgtaggaagacgctaccgaaatttcatataggagggatcgatgtagcacaaccctgtaaaactacatatgtacgcagggagagggagagagaacgctgacagaaattggtcaagtcttcttcctaatcaatcttgcactcgaaatcgtccttgacctggtcgcatatgctcaacgtctctgcacgacttgtaagtgagtacactgtgaacgcggcaagccatggcgttgtgctgagctgtgggtcttcgataatgtcgccttttccgaaattcatgataggatccatcacacgggacatgagggttggacttctttccgcaaggtctttccacggatcatcagaggcaaccacaccggacttttctgcttgaatggctgatatcgcgacatgacgacgagcctgatgaggttgcgacaaggcgcgaagcctatattcgtccctaagtgcgatcagaatgtgaagtgcgaacaaatcgaccccatttgtataagcagtagcacatgtgtctacatagcctggcggtctggcgttaatctcaatgagaaacacgctggcatcatgggcggggtggatagggttgggacgcaaatccaggggttccccgtcgcctcctggctggtattgatgactggaattccgcacccgagcctccacgtggaaaacgccggagcggaatccaaggcgcaatatagcttgatgtagagccttctgaagagtagcaacttctgacggtggaagagtagaggggaacacatttagggtctctttgaagttgtcggaatctgcgttaccttcactcgactcagcggtgcaaggaaaattatcgatcacctcaaaaaatatgatctcgccgcgcaataagacaaaattgcagtctacctctggcccgtcgcaatactcttcaatcagaacatcggtctgccatccagagtcttttgagatttccccggttctggaaaatgcggtctgccttgacactttccccacggcttcgatcagtccctgcaaggtagtaaccttatggacgcccagactatgccagccaaagcagggtttgacaatccacggcgggccgggaggaagcgcatttctctcgtttgatgttatttgtgagatgaggccatcgaggctagagaccaaacggcatgagtctggactgagttccgaacgcgtgttgtgcttattgacagatttggcaaaagactcagatggagatgttggcagaccgaggcactctgctgcttgagcgaccggaatgagcaggaattcagtcactgtggtcaatccatggatggggcggttgtagccttggatggcgttactgatgcgacgcgaaagtccgtcgtccgccgtcatgtcgatttcaataaaagcttctctgggggctagctttacagctcctccttttcccagccaatgtccgcgtggccctatagccacaaccttcactccgagggcatgagccgccttgaagaatcgccaagaagcatttatctgacgcacttcgccaaccacggccagtctgcgcatgttgatagactttggggaagtccattgaagtgacagttgctcgatcagctgtgattggatggtattctccagttgggtatatgagtccccatcatcatcgatcaagatacaacacacggctgctctcaggagttgcgagagaccttgttgagggaattgaggccaatggacaaactccatgggttcgaccagccctactaccttatgtattcctgagcagccacggagtcgttcctcaaaaatatcatttcgaatcatgtaccctgcttcattgggtatgatgaatttgagcaatttctgctcgctttgaacatgcgataaaaagcttgagtcggtattcatgcatgcaaatatcgaatcaagcttcgtacgcttcatggcaattgtgatgggaacggagttagtgctcatcactagtagcgactttgctcctgagaccacgacttggcatttttcaatgagctctggaggggcaggctggacaagggcagtaagaatgctgcattttgtaccgctctcgttttgcatatgctgaaagcctatagttgtgatcgtcatgtagactaggaattgttagttatacaggacgaaacaaaaggcgaaaagtacactaccatcccgcacgcgatcaaaaagaatacagaaatccgaagacattgtggttattcccttggacgtgttttttttttcaaataattattcatcttctgcatcaagggcttttgaagttttgttctctgggatctatcaacacccaatgtgacgtcgccacgatatccgaactccgagtttgattccgatcacattttcagcaaatcccaaggtactgtcaggttatgtcatgtcatataatgactgtgcattaataaagtccctgtgccccataattcatttcgtcgttttcttcatgagcgaaaaaccccgtcattgatgaaaaacagagaagctcagtccgtatctatgtcttcaccaactctgcagggtcgcatagccacagaagacgaaattcgcgatttacagcatgtcccagcgcatcttcctaagcgagtctggttggcggcgactattggaatggcggagcggtttgcttattatggaacacagaccctcttccgtcagtatacaactctcaattacctttgatctctctgttaaccaggataaacagaaaactatctccagaacaagccaaccgacttggtacctggggcgatgggactgggaaagtctacagcaaccactgtgaatttagcgttcactgtgttggtaaacatcctaccattgccgacatccgttcttgtagatggagtgttaggccgatatcgatctcttcaaatatttacgtggttagttgatattcttctgctttgcgctctcacccattttaactgactgatcaatgtctcttgtacacctgcagcatctacgcagttggatccacagtcctttttgcgacctcctttccttcggaaatgaagacaggtatctcgactcccggatttgtggttggggcgattctcattgctctcggcctcggaggggtacaagcatccatccagcctttcatcggtatgagctagaaagcagaagcagagtgccttggctgattgacttgcagcggatcaatacaccgaatcagatatgcgaatcagaacaaacaaacaagggcaaaaagtggtggaagatcgcgaactcaccatccaatacatctacaatgtatattactggtaggtaggaaggagagacatatgaaggggtttagctaatggacttcgccggtaggatggtcaatgtcggttcattaggtagtgtcgccactacgttgatggagaaatatattggcttttggtcagcttacttgctggatctttgtgccgtggctatttgcgtgttggtggtccaagtggcgaggccaaaatttggtgcgtttggtggtctatgtcgcaaacgctgacatgtatctaatcgctttcaccaactagtacacccgcctatccaaggctcaaagcttccccttgctgctcgctgcctatggtgcgcagcgaaaggaggattcaaactcgatgccgctctcccggagaaacaattggaggtgcacggccgagtcgttccctgggatgaagagttcatcgcggagcttcggggtgctttgtcggccttcaaaatctggtgagtggtactgagttacaatttggcggtctatgtcggtctactgacatgagtagcattggttggccaattttctgggtttgcatgggcgaggggtcccaggtatcaatctctcaagcgggtcaaatggagacgcacgggatccccaacgatctcatcaaatctgccaacccggtagcctacgtcttatttggagttatagttcagaagcaactatatccgttcttgcagaaacgcaagattgtcttcagcccggtcaatcgcatcacgcttgggtttgccattatggcaattgccatggcatactcggccgttgtccagaatgcgatataccaggccggtccgtgttactcacgtcctcttgcgtgcgacgcatctcagggagggcaaattccaaatcatgtccatgtgctcctacagcttcccacctttgtgataatcgctattgccgaggtattctgctggccaaccggctctgagtatacttattcgcacgcccctaagagcatgaagtcaatattgcaagcgtgctatatcggaacggcaggattaggatatctcttaggcatggcgttgtccccactcgccaaggatcctctgctagtcgtgttgtggtctttggtcgctggaatgatgttcctgacggcctgtgcatttcgtgttgccttccgcaaatattagatgacaatcaggatttggagtcgacagaacggcagcaatagcaagtgcagccaaaaggcatggaaaacatagcatttggttctagcttctgtggatgatagaccctttgggaagcagtcttattagagatagaacatatgtggcaagcttggtcctggcacggtgatggttgagcttggttcagagtgggatgaacagttggcacatgtattgaaccccattttgctgcagtttttgattgcgggcagtctaaataatgaccgacgtgtgtgatattatttttcatctaattaaacggaagcctgaagtaaagatatgcaatctacacctaattcctagactccaggagcagatcctgctctggaggtcgtggatcatccgctgagcgtacttggtggtgcaaccaatagtgctgatagatgaagaccatatcaaaagggatggtcgcattaccaagatcgaaagacccgccgtagactgccggcgataattcattactgcctacggggtgtgcttggtcgttgccagctgtaggcctacattgaatgactcggcgaaagtccaatcagtatatgagaaagtgataggatgcatgtacttgctcaccacgtcaatccattctcgtcaaggtcctataggaataaaaatctggcaacatccgaggcgagcacggcaagataactcccggattctaccaaggtcaatcgacttgcccgttgcgatttagatttgaagttctaaagccacacctatataataggtgactggagatcaagcagcagatcaatgacccatgaaggacgtagacgaaatcgttcgattgaacagccagtatgggctctaggaattacgatacgcgtactatgctcaaacggtactgggcaaaagaagcagccattgaatcccgtatatgcggttagaccggaaaggcattaagctggacgaagacgaatgagaagccgtcggttgaccgtcggcgatggttgtggatcacttgcgggtagaagaaaaaaggccatagtatgagaaagggcatgcaacctgctgacagccatgtctcggaaattgacataagagaaaagtacatttgaacttgtagggagtcaacgtttcggaataaacacggggttcggagtccggagttcggaactcgtcaaacttggtatgcttagctacgtaggtacctaggtataaccaataacggacttaataaaaagccatcagtcacgagtggataatcaagtgactagtgactacatgcgtctcagagagatctacgataagacaaatttggccaaggctgcacagtcatttggccattataaaattggtagcttatttggcgcttacctacagaatcatatatcataacttcttcgagttctttgagaagagaatttacgcccatcaaacctttcctggcgcctcaaacttacttgcacttagcagcagactcgaataagatcattttcatcatgctagaaaagccagcattgcagcgattcgaaactttacaacttcacgctgggtacgacactcaggccactagttccaaaactagcttactgatgcgttgaaatatagagcgtttcccgatgctttgaatagctgctcagttcctatttacacgacggcagcatttggattcaacaatgccgagcatggcgtgcgtctcttgaatgttagcgaattcggcaatatctacagccgtattaccaatgtaagaaaatatcaccttcctctacctttaaatcgcagtatcagtctaagccctacctcttatttcagccaactgttagcgttttccaaaatcgcatggcagctcttgaaggtggcgtcgctgcttgtgcagtcgcatcaggctcagccgccgtgtcgatgacactgatggcactggcagggattggtgacaacattgttgcctctttccatgtccatggtggcacattgcatcaattcaaagtgctggctccacaattaggtattgagtctcgatttgtcacctcaaatgacccggaagactttcgatccaagatagatgagaagactaagttcattttcgtggagagcattagcaatccgaaatatgttgttccggatctcgaagcactcgcgaaaattgcccactcaaagggaattcctctcattgtcagtatcctcctattaccctcttcgcaaactcgcaccagactaaacgagattccaggtcgataatacatttgggtgtgccggttacttctgccgaccaattgatcacggagcagacattgtgctccattcggcaaccaaatggatctgtggtcatggtacaaccctcggtggagttatcatcgatgcagggacatttgactggggcgctcaagacgacaaattcccgcagttccatgtgaatggtgccgaagagggcagtggcgaactaagtttgtggaatatgtttggctcacgcgcctttgccatccgttgccagttcgaggttctgcgtgacatcggtagttcaatgagccctcaggctgctcagcagcttattatcgggttggaatctctggcggtccggtgtgaccggcacaccagcaataccagggctctagctacttggctcgagcaacagccgtcggttgcttgggtccgatatctggggaatgaggaccatccgagccacaaaaatgcagaaaggtaccttcaccgtgggtatggcggggtcttttcatttggaatcaagggtggcaagcaagccggattcaaattgtgtgatgggcttaagctgatcattaacaccgccaagtatgttccatctgtaaatcccccatctaaggaggctttagctgacaaatatgtacttgatagccttggagactcaaagaccctcgtggtgcatccctggacgactactcatcaacagcttactgatgccgagagacttgatgcgggggtggatgaagaccatatgcgtctttctgtgggcatagagcatattgatgatctgaaagatgacttctgccaagcttttgcgtcgatgaatgagactacaaaggcctctgccaattcagttaaacagaattctcacattgaagagcagaagcgaatggtccggactttatttgggtcccgcgatcctttgcccctttccgtacccagctagatgatagaatggatatttttgaccgaccatggtctgttggatttctcctactttgtagactcaaagcatccgctaaattcaatactctactgttgggattgaggtcatatgaagagaccagggtggagactcaggcaagcacatggtatatagtatgtgagccaattttcctaattaggactgattttacagcattggtgaccaattgtttcatccagcaaatcctccaatagctcgattggtacccaatatcagtagaggttcgttgtggagaaatcccagaggtgctgccggggtttctacactgagcgcacgagtattttatttttatttttatttccatgcttaatgcggcctacacaaattctttgatattgtcaaatacgacgtctgcgctcgaaataacggcaactaacgattttgccctttccttcacatccagggagccagtcgtcgaagcaaatctcatcatgcccgctaccgctaatgccccatttagatcaacaatgcctcgtgtctcttggaacgtatctctgatagcactttgaatctcacatgctttcaccatgatcacatggtccactacatgcggattgactcgtgaaatctccgttgtcaacgttctgtcgaggtgatcgtggctgatgacaggtagattgtcctgtcctgttttcaaagcgtttgggatatgtgtattacattccgcattcggtaaatcaatcggaaacccgtagagcttcgagagctccactgaaggtagaacgtcgacgccgataaccttcacatgtggtgcaaattgtttgactgatagaccaattgcttcgagggcacctcctgctcgggcgctgcagaatatcccttccagctgttggtcgtccttgacttgtctgagaatctctaacgccactgttcctagcccggccagcgtgtaggggtcattcaggggatcgatgtagagagcctgcacgttgaacgcggcggagagtggacctgatggctcatcggaaaggtgttccacgacagatcccatttgttgtagctcgtgcacttcatttgggcacatttctggaccaactaaaataactgctggaatattaaggagacgcgcagaatacgcgattgcacgagcatattgtcctggaagagtccaattggttaggtttaagtcatgcaaagtagcatagatcttcacctttggaaggaatgacaacgcccctccatcgattctcaggtgtgatgtgactcatagagttgtataggccgcgtacatgcgggctgaaacttaattgctgatcctcgcgtttgaggtagagctggaagtccacatgccgactgaggttgtgtgctgggcttaaatctgtgcttctaatcatgtcatgtaccctagacatgactattaattgagcatactatatgtttcattaacatctaagctatagttctggactggcatacatacatctggatttgaacaacacgcgttgtggacttgcgatttctgtagcatggtcgagagcaagacttcacccgggtcaagaagacctcaagtcaagactgagagcgtgacaacaattctttttttaaaaaataaaagaaataaaaaataaaacgagagcatgtaagaagcaatattcccaaactaaattagtcgcgagtatcgaagtgatcctcaagtcaataatggaattagggtccaatacaatcaattattgaagccagtgtaagctagaaaagtccagctagtccgggaaacaggggcgtctcagccgtacttactgtactgcccaatgcccctcggactagctcgatattaactgcacagtcaggtgtggacccattgaatttagatgaaacataacacgtgaagacttggctaattgcaatatgtgcgattttctattgctactccgtacagtacgatattcttcctacctcatgatagctgccggatagcaagtccatacgacaagagatttcagggctattatgtgcagcgggtctcgaggcaaaccctcataatgggatatgcaatgtcacgtcggaacgtgatctttacgtttataaggcgcttttatgtatattaggttaaataaaatatccgctattatacgtggcccatatgctcaattgcaacttcaagaggtggctgtgtagcatcaggattgtttgtggttgcactggcctctttcctcggactgcccgaatgccaggcctcgcgaaggtacgaagatattcctatgccgggtcagatggcgcttttgaaaaatcttgttgacctaccgaggagttttgtgagagcctttacactcctatgggtatcttgcgctcccacacacttgaaggctgcatctggagacacctcttcgtggcgctagagataagtactcgataatcgacttatgattattaaggattctaagaggtgcataaaatctgtttactgccttctctcatggcctgcatgcgcacctcggactctccgtatagaagccgaacggcgtagcttgttcctcttcgctgtttgcgtctattgactgggtggtgatataatcatacatcaaggaaagctgtccagattccatatcaaactttgttgtacacataaacaacacaagatcctggcccctcatttacctgatattctaactagcacttagaaaatccctcatcataactaaatgaaacctaataggtcttcctaggagctctcagaccctccatgccacgacaatatgattggtgagatgagtatagatcctaggagctcgagtgctggtgcccatttgcggggactgtggccgctaatgctgagagtcaaagtatataaaagaaacactgatccctcctagagtgaacgtatccaggtttcaagcattctcctcaagactgctgctcataagttcaagcaaccgtcggcattccgggtctgtcccctcagccagagcaaaagcctaacgagtatgcagatttttttaatgccgcaaagcaaaccgacaacctagtcgatatccaatgtatccatccgacgagagttgcaagaccgtttcctgcatactcctgagctctgagtttgttatatatggccatggcctaatgggaagatgtaagtgactctcactattgtaccagggggagcgcgaaaatttgcagggggcctgtggctgactgaatttagtagcataaatctactgaggttggagtgagaacagatcctagcttgatttctcggtctgattacacgtactaaaacctacttcaattgtacgtgctctttttgtcatttacctggacgcaaatggtgtgcttcctccgattgagccgaaccaacgatagccccttccacgcaggtgagtttgatccgcgacgcctgttcttctccaaatgtaggcatcgacatagaccaatgtccgtgagatacctgagccttccttcaaacatggtctaaattgatacttgtctacggtaaagtagtagtggttcagaaacccaaaaggctccaggttagtataaaaccccagaaagagagagcctgaagatattaagaaatcacatgaaaataaaacccgaacccccccccccccaaggcggcctctcccaaaccctcaacccaccgcctctgctattgagcatgtgtgtaccataatatggctatatattatcggtcacgtcatttcgcctgtatcatcccacctgaattataggcatctttttgctccctggccctaatttgtcggaccatgcttccatgcttcttcccgccatcgttgaacttgagagccttcatccacgagtcaagacatccgagaaaacaggaagagctcttctattggagcgaagactcgccatcttgattcgttaatgtattcaggcttgacatggcaatcaaaaggcccgctgccctctgcatcctagcttcatattgcagactcggaacctgttaagatactcgctagttgtcttattatattgcctatgtttgccaggtcgatactgttggtctacacatgtcaggttcagtaactgttgcagatttgagcctcgtacatatcaggacccaagccgcattatcgaaattatatctgcactacctataggaaggacgagctcgttaggtaccagctggacttcaccttgtaaccctcaaaatgaataaccgaccttcttcgaattactacaatgacggatatttctagaacagccaaatggcagatatatgggcaaggcgcgaaaatatacttccaggtactggattatttcggcaaagacgagaacgttggaaaatgtgaaaagtgcaatcacgacttgagattgggtagtctgaccatttcgcaatcgcttagtcaggctgttctgggttcgtactcggtacaattgctccttgattaccgacgtaagataattaccaaattcctgtacagcccgcacagccacctcttcgagacaaacaagccacagtacctgaaactcctgcaatacctgaaacaggtatggtcttgtatgataccgttatcgtacagtgctgttgcagataccattaggtgttttacgactcgaccgcgactctatcaaaattgttgaagcccaaaattttcttgccgatagtactactaattttggaacatataggttggatctacactatatatggatcaaagaagcagagggagagttatattaggagagatggagcgagctcccaaacaactaacgtattttccatgcgagctgcgcaccctacccaaaacgcgtccatgaattagaactctgttagcttaaccacccaccgtggcaccaattcgctcttgaattcaatagagaaagagggtaggaccttattagttattatcggttctgagagatgcagtatgcgctagtaccggaagaagccaatgaggccattgctcagtacttgagatgtgtatttctgtatagttctatctgcaaatttaaggggctcgtttaagctgattaagcagttgatgccttgggaatcagggagcagtggttgttgaatgaaatagactacactagtaagattcttctccactttgaccgacagttatccaggcttctaagagtcaagaaattagcgctattcgcgaagcagcacgccgttttaaagtgcttagttaaggaacaaactggaagccagagatgtcaggaaccgaaaagtcgcactaaaatgactcacaaaagctcacgatgcttaatgatgttttccgcacctccatcatgttaagtaagttaagtaataccctgagcccaaatacgtacagtgtctccagtcgttacagtacagcgattttcgaaaacagtttacccctcagacacacggtttgtttctcggctcgtacccgaaaactgcgctagtccatatatggctaattcaaaactaaccccagcttagctgtatcgcagtatttaatgtattgggattctgcgtcaaatgagtcgttgttaattaccgtacacgacaatggaatgttctaggaagacagtcgcaggcacaacggcaatctggcgacctggcctgatccatgcccactcgcttcttcctttttctccatagctgttactgtatcgtctacatcaacatacatgtcgaagactccgtagagtactaacttggtaggctaagttggttctcgtttatgctccccatagcacacgtttcctatcgcaactctcattcgtcattgggcttgttgggaaagccagtaccgctcactcatgctgacaggcctccaggctttaatcgtgtgtagatatggacggcagccctatcatgataattacatctctcagccccaagaatacgaaccatgggaacaggattcacaatattctccccctaccccgggatacttccgaagcccatatgctccatcttccaactgcagcccttccccatccaccccacccgagaatgatcgcagctccgcgaggcaacgacctagtacactgcctctgctacaagaatccgaatgggagccagaaaaagcctacgacgaggatccaccaaactgcatccattatttcatagaatggcgagtcacccttaacaagaagaccgttgttaaagacacggaagaagatcttgtattggccccaggcgcctactggaagttgttcctggaagaaaagctacagaccgtcctcctagagaaagtgccccgcgacaaaagggtcagagttgatgacacggcaatcatggtctcaaacagcgaccgttcccagcgtgatctgaacaagcgtttcaacaaaactgaaatagtttgggcccctattgaaaaacaactcaggatgtggtcgagtcatttctgccgtggaaaaagattgactttgagagtctgtttcaattatatagaagactgcgattccccacccaccggacgaaatggtgaaaagagagggaaatcctccgtcacaaggaggatgcttggcgatcgcgatgcccagctggatgccgaagaaaacgcatgcggacagcaatctatttggcgccgtgtttatgatttgatgaaatgcgattcagcggcatgccacttgggcccttattgctggctagatccgaagggaaagaagcattatcgactccgtacgcaaacactcagacgtctggtcacctatgccgagaaaggtggtatcctggagacgcacagggacgtcccggatgaaatccgagatgagctctacatggaagaacagcagagggaagaaaaagataagcgcaaaggcagtaatattcttggcagtcaaatgtcacatttgccgatcaacattaatgttcacccccctggagtggccacaacggcttcagctgttgtgacagctgggcaaaaatccgtgagttcgttgaagatccctggtctcaaggacgtggccgtcaaagaatatggtgagtggcttgcatctaatgtatctgatgatactctgaaagctgcatttcgacaagcgtgtggtataaccctgtctgatggctttgagcttgagcacatctacaaagatcaaaatccggaatttttcgtcagcaaaggaatcaaacccggaattgctcggagtttcgtagaaaacattggggattgggtcgagaatgtgaaaaaagttctgcctgttctcgagttggtgtagacaagctgtgggagttgcctgctgttatttggtgtttttctttcccgctcagtttgtatgcaactctggaatatgaagcacaagtacgtcctttttttgttcgagataattttagtgtgaattttgttccggggtcaaattagcggtaggacaaagtgaagcgtggtaaaggcccccatcggatgctagcgatgtgacgttccgtgggcccgggaatcaccctgttttctcgcccaacgagtctgttcgtcaaaagctcgctttcttcccctttcatatgcctcaggccccgttctcgaagttctgaaaagaagtcaaaagcagcgtcgaacgtatcaggatatgcaagctgtgtgccagatgcttctcccataatgatgcattctgagccaacggcgttgtttgatgtggcactccgatcaaatattcgacgcacgggaatttgaaggaagtctcgagtctaggttgagcatgaactagccgcccttgcgattaactggtttcaggtgaacttacaagcttcatggtcgcgactccggacgcagttgtatagaacgctgggccagcatttggattgggtatacgagcaagcactctttttccatcattcatgatcaaacggaagaccttgttatatcctccttcggccagcttcgttatggagatgcagctctctgatcgaacggctttggccgcgaggctttgcagctcagcaaggtaaaaggccttatccctgtccctgagctgcttttctccatctcagaaccatcatccactggtacaacagaagaagtgctcgtgatcaggatttggttgtcatttggtcggagagactcgtgatcgtgcgaacgatgcgaaacggaagagtagtggtcgtagcttgaaaccgagatggtgctgaaaagaagacagacttccgtggttgaaaacaacaaggtgaacagtttctcaaatttggaagagctgaaagtgcacgacgtcccatgacaacgttcattgctacatagtgtccggttgagaacagtcccaaaatcattggcgccaagggctgggtgtagccgcctggacttcttggcgcttactaagtcacatcagccacagctactaattttaattttgaaacagcatgacgattacaaccgtatgtacagggatggatgcatgtgacggacatgaaagggactgcagtggtggtggaatggccttagcacatcatttatttgatgttggtcattatactgaccgctttgaacgttcagcaacaaattgcggggccaagatattgagtcaaaaatgttattcaccaccgacggctgatgatcaaagaccgaagacttcgaccatagtttcaatgttgtctttcgcacaaaagcttctacctcctacagtggggtcccacagtcggaaaccagtataatgtactgtttctacctcccacccatatggtcggaacagaattatactaccttctaaatgcatagaccgtccagcaaaggcaaattctaagtgatgtgtcccaaatctcacctagcgtgttattagggccgtaatacaccctgtcctatggaatgccactgtacctccacgtccctcggtttgcataaattgaatgaaactggtggcaaagaccgcattctcaaacatcaacatagtatcaaacaatatgttggcgcaagcacgcaagtaaatcaacagcagtgcatggcgcccagagatacagctccatggcgatgacaataatagaaaaacacacccaaacatattcacgaataagaacttcccaaccatttttcagatagcgataccagttctgcactttcatggttctaaaagcatccagtatgctaagacagcgtgtcccatttttggctcggcctccaaaactccggtcgaagggtacaacagtttgttcattctcgggtagcatcgatgccgcaactcttacatacatagctcctgttaaaatcgaagccgagtattccgacacaatcgggattgcatgaaagacgatattggcgcatgttgttagtggataaggtattctttcataagcctggttactcagcgcagcgaaaacaacgccgcggaagaaagccaaaagggttgttgcaagatagtgaacgcagttcggcaggactatatccagaaatgcaactggtagtatttcgagccattctcgccagccaggaattctctgccaaatcgtctgttttctgggttttgaaacgacggtgtgaacccaagcagcgtggaggttcgttagagaaagtcccaataacagccttgataagccaaggacagggaatgtggctccgtcttctgcagaaattggtttagatagagccatgatcacaactgtcaaaagcatatatatcatgaactcctcgaggccagtgaaaatgaaccaaaatcctctttcgttgtgcaagtgccgacgagcaaggcttcgttgattggtgacagcattggatgtagtcgagatagtaaaaatattgcccatgatcattatactgccgcatattaaaaagccagtcactatgttgtttggatcactatcgatgactccagcgagcgataggacgaataagccggcgaggccgagaaaaccaccacacagggtaggaaatagttctcggatggagttatgtctcaggctccagaggaactccctggcattctccgattcgtcccttgttgttctaccacttcggccggtaggtggatcctcgatttttccaactacaaacaaaccggtctcttgcgggttttcgtcctctatggaagttggggtttctaggatagccagggccgctatgacgcttccatctgtgtattcgaactgaaagaccatgctttattagtgtcacgctttccccaaaatgaacttagcaggatctgtcaggtctcaccataaagagaaaaagtaaactaaatagtgatgtcgcgaccacaatcgtgggcatctcggtctggaaatccgcgttggagaaccgcacgagacagaacagggcagactgccaccgtgccagggatcctagtggcatcaggccgaacgatcacgaatgagataaacacttgagggaacaggtcgtcgtctacagcctcgctgggaaggtagggatgctcgagttaaaagaggagatgaagactaccacagcccggatgtaagtggtaaatgtggaagaaaaaggtgtggaggggaaaaggagggtgtgggtcaagccacatcgctagatctcccacatcttacgtagacactctatggagatttacagtattttacaaagactcattgagcgctgagatctaatacgctaaaagacacgatacggtcaagcagggattgtttatagggtagcctattatggactagcttggtttcagatacgggccgaggcacaatccatgtgttgggaatctatttcccactttcactgtatccctgcccactctccagtccctaatacccccgcggccctaggtccaaggcattttttttatttttttattcaaccttctcaccgaagtaggtgtcctgcgactcggaaaaatagaatgatccacctccactagtctgtcaatagcacccataatccctaagcgcagccctgtcaacatcgagagttcatttatctatctctcattcctgcttaaaatggcgcgtatccctaatcgatctgcgacctacgaagaagttcgaatttacattgcgcagacccttatatccaagtataatgcaggccatgacttcgcagaagatactgcccgctcgtggcgattagggcggggttctgagctttatgatgcgaaattggaatattttcaagaggtatttgggatggatacgggtctctgtctattccaaagtgtctgtgaggatagagacaatgcttggaagcagtcagttattggagttatttgcttctgtaggttaccactgttcagccaatacgaattatattgatcgctatatgctagggatgactattgtgtccgctgcgttgctcttttggtttcatatcctaccattacttcgcggccaaacaggctgtaagtgacttgtaacagctggtatcctatattatcagtgtgctaataatctctttgcatagcaccttcccaattactcctttttggcttaaccagggcaatctatgcttatctaagccctaggcgcgatgactatatgctagtgagtggtttgtttagtgcctgtattgcgttagttgctgcaacgcgtggctagtgaatgcactggggatctcgagggacaccacaacgcatgttatctccgaatttacacaatacggaccgtgcaataggccagtatttttccacctacactaccgcttaaattagcgatcaagcccggacgtttctagggctagcatccgaggaagaatgcacagccatgcatgaaattaagaaggggcacatgtatcttgatagtaattaggacgagcgaaaccgaacatctggaccgttatagttgttaaagaaaacaaaagagtcgacagattagacagggagcgggattgcatcgaagcgccatgtgacctacatccctggactcacttgtgggtggatgggggttgtacacggtacaagacggattcttacagtgatataatcaagagcgttttgctactgttagccgataccatatcatctggactaggattgttgagaatgtaagcaaagtagattagaatgtttatacttcaggtcggaaattggttaaatctgattatggatatcgtagtatcacggacgaaatgcagccttgatggggagagagctatttagtgaggtctaacttggcattcaagagtgatagatgagtgaagaagcctcttcggggtaaataagatggaaggccactgacacactcatgtgcatggcattctcgtgtaaaaatcaaaggttgaggctctttcgcgccgtataaaatattatgcctattcttgtacattggcggctataccgtatgaagattggcatgaatcaagttggggttcggcaattaacctccaacagtgtggagttaaaactgatttcgaatatgactgtacaacagtgacttcggacaacaaaaatctaactttgctagatgcctatttccatcaaaccccttcgtgcattcaccgataggattccgtgggcgaaaatattcgaggaagccgagaatacgaccaaacggcagcgtctttacccatcccagagtcatgatcagaagaagaactacagattagacaaaggtgcaactctcagcaaaacccaacaggagattgttatctaagcgaataaaggtgccgcgaacgcagaggtgaaaagaagctcagaaggacagtcacaggattctggccaaatgggtcattgatccaaatgatgtggacgcagaaaaggcgtagaaggacttggacgctcaaggccaacaactgagaagtcactctgttcaggaagtctgttggctgtacaagggaatcagaagaaaggtagatgacgacgatgagacgggtttgaatatacgattgatcacttcatgttactgtattttgtcatatgaaggagaattctaacaatctaaatcctcaacgctaaggcctgcatgccgaaaatggcccctagcactgtctttctttgccccaacttgattaatacacctctcaaggaaagtgctgaaatctcggtcgggatcatctgcaaagtagctccaattacgttttatgaatcctttgagctcagagaaaaattcctcaattggattgagatccggcgagtatggaggcaaatagaccactttcacgccagcgtcggcacacatctgtgagattcgttcggagtaatgaaacgatgcattatccattaccaagacagacttcggctcgggccatctcccacaatgccgaaggagttcatcaataaagtcctcgaagacaatggcatccgttgacccacgaaagacgcgagagagcacaagaccgtcttgagcgtaggcgggcaaaatttgatagcgctcgtcacgatgaaactgcgacacttgccgcggtgccacaccgagtggtgaccagcctgtccgtcgaaacgaaattcgcttgtcacatccagattcgtcaacataaacaaggtggtatgactcaaactcggagaggttatgaagatatatctcccgtaactcggcgttctgctccttcgctttctgacgagcagtctttctcgaccagccgttagatacgagggcccttctaatgctagaagttgttgctagcatctgtaattcatcccataggaagatagccatctcgtcgaggtacaagcctggtttttccagcagatggtcacagagcgcttctaacattagcggcgtgatacttcgtctccgtccgacgcgatttgggggggcatgaacgtttccaaagaggcgcaagtttctgcgtatatttttgattgtctgttcgctacactccgccgcgtcggccattcgataacgggtaagtgactggccttgtatcatatcactaatgaattgccgcttggacggggaaagcctcggtgccatattactagaactgctcgaatgttcaatgtgtgctgagctggatggatgtcaagggtatggaggggcattcaggttggaatgtattgggatttcatgtaatatacagtataataagtaataaagttgtttggaaacaaaggaatattctattattagatgattattaattactccttagatggaagtagttagcgtggttccgggtacgggccgagaaacaaagcgcctgtgtccgaggggtaaactgttttcgaaaatcgctgtacggtgtatatcgtttcgacgaggggtcagcgtaaatgaattacacacacacacacacacacacacacacacaaaattcattaacgcctggcggctaaaccgaaagggcaactatcactgatctatcaatacatgtcctagtgtacatgtgccttatctccttagaacccatacctggttcctttcagtatatgtcatcgcagctgtcaatatcgtagcgggtcctcgtgagttagtaattctgttagtggactgacttgaaggtgcttcttcaagttttcaacatcctatcctcggcagttgaagcgcgtctaccgtctctggcacaaggtggttggtgtgggttagtttgggggaggttgtcattgtgttggtcgacatggttaagcggcgtcaagtcggtccgtggcgattgcgaatcgtattgaggctcgcactgcttccaagttcggcgcccagttctggtcatccgaaggtgattttccgcccaggaagaaagacatgttgcctccgtgggtacaggtatattgcagcattttcgtccagtgcatagtccacttccgacatcaaaagaggaagtgttccacggtctctcttgcttgtccacatacacaggatgaggaagtgcggcaaacttcaataatatcgactgacatcggcaatgggggaatggctgtaaaggaacatgaagcaggcaatgtttttgcttctgtttcggcttcagagggattgaacgattttggcaaatcttaacaaccggcttttggttacagtaacttccatgttttatgtagctttccgttgccaagaatttcaccaaggttggaatatccccagaaaacatgattatgatgatataaaaaagtaatatacgtagctaggtgggcgaattaatgcgaaattgtctttattacctatctcagatgtttttgtggatgatcttggcgtcatagtaataaacagcggattttctagtcgcgcgtgtcaccttgtaattctcactttagcactttgtacttattgtttggaaaggcgcgatcaaataaaaaaccaagtgattattgtttctgctgctctcaggcgatattcaatacgtgaattgggagcaacgatactcgaatgtgcaggtacgttgggggcgtttcatcacacagggcaaatcatgtcacggggatgggggttagagtgcgatcttgattctaccaaaaagtggttaaacaggggggttaagaaggggggttaagcagagcggttaagaagaagggtggttaagaagagtggttaagaagagtggttaagaagagtggttaagaagagtggttaagaagagtggttaagaagagtggttaagaagagtgtgcagatctagcgcagccaaggataatataaatggcaagataaggcccctcatctagctctaacatatggtatcatccgcaacgtgggggcaaggggctcgatatgctgaactccgcatattccgaactccaggactattccggactccaggtctggtccgaaggtgggaatgcgcatcattcccccttcctccgacttgcgccgttttccctctctccggtcatagtagatgtcgaggaacaattctgtccatattgagccctcatgttaaacgacacatggacgcacacagtctcccaaatcctgggctggacttatttcatcctgtggtcgctgtctttctacccgcaagtcctgcacaatcaccgccgccgctcaatggacggcttctctgtcgactttgcggtgcttaacatcctcggtttgaccgcatacacaatttccaatgcctgcttcctcttttcgccggttgtgcgggcccagtatgcccaaaggcatccccagggcgccgaaccgaccgtccaatggaacgattttgtctacgccctccacggagccctggtctgttgcctgattggcagccacttcctctatgcgaggttctggaactttcagtccaagtcacaacgcgtgagtatcttggctttcgtggtcatttgggcctgcgtgggggtggtggccttggccattctgtacgtttgggtttcagcgtcgtgggaatggattgacgtggtaagaaagcatgcggcgatcaaatcactactagcccgatatgtgctgactctcatattcacataaggtttatgtggtcggcatgatcaaggttttcctaaccgccgtcaagtacactccccaggccgcaatgaactacttaaggcagtccacggcagggctttccattgtcgcgattctgcttgatctgacgggtgctgcgctgtcgttgatgcagctggtgctggactcttcgttgcaggcggactggtcgggtaccaccggaaatattgccaaactcctactgggaaacattaccgtcctattcgatctcatctttatcttccagcactttgtgttgtatcaggaacaaccggcggagaggaagctagggctatcagagcatgatccgctcctggatagtagtgacgagccatagatacacacaatcatatggtctgaatttctccctatgtctgcgacatgtatgaaccagcaatgatgcaacttgtattcgaggtccgttcccttatggagctgaaaaggttgggaagaacgaaacataataatccacctataaataaggcagtgcggaatgacctccagcccatgaccagacgctcgtgcatttcgactaatctatacagtgagcagcagcggtagcgaacttagtagtgagtaccacacgagtcgatgaaaagcttaagtgacactatagctccatgtatcacacgcgaagcgttattctgtactaccggacagtgtttgatatatatatatagtcaagcacaggcaggggaaaatatgttcttccctcatttatggtttgttccaacctcttcaaccaccgaactttcaatccagataccctcaaccaccgtatagacaaagcttcttcaaggatcaccacatcccaccacaggcaagccccggtaagcccatcatgtaagggtaggcccgatacctatggagcggtagcgcccatggcagtggagtccttccgccatttcacgggaaaaaaggaagacactaaaaccttcatcaggttaatctctgagcccatcgattagagagcctggaacagtctcgtttgataggtatgtatcgaagtctttgttgatctagtacttgcgaaatgcaacacgaaacgcacaggcagtaatgaacatcagcccggcaactactgatcacatcacgaccagcaaagagtctctcgcaaggggtgatagtgccatgcctaacaagtaaccgagccctgctgtcccgatataacacgcctgcaagatcgacttcatgctttttgaggcgtgggaataggtatactcagagcccgtgggccagcagaacacttccgctagtgcaatgatgatgaaggtgggggagctgccacagcacatgggtgcggtttgggacctgtccgctgtctgaggccccgcacgcaagggggtgcgagtagcagggacccgtacgatagataaaagcctgcaccacggccgagtacgccatggctacggacatgatgacaaagcctagtggaatccggtccactgcgtggaaggcaattctgcgcttctgcaagaatggatacagctgtttctggacgatgggtccgaaaatcacataggctatcgggttcgcggatttgatcagatcgttagggattccgtgggtttccacttgccccgcctgcgagatggatacctgggctccttctcccatacaaacccagaagattggccatccaatgctattggggttagacgagctctacatttcgcaacgcggattccggtggttgggtaggggaaagtagtcaacgcaccagattttaaaagctgacagggcatcccgcagctctgcaataactccttgtcccagcggaccactcgtccatgcgtctcttgttgatattggggcagagcggcgttgagcttgaatccccctcggacagcataccacaagcatcgagcagcacgaggcagcttagagccttggacgggcggatggactggcccaaacatcattaaacctattgacacagctctatgagaaagatttgcaagacgcaccgaatctggatttcgctacctggacgataaacacgcaaaggatgaccgcacagagatccagcagataagccgacgagaacccgatgtgtttttccatcagcgtggtggcgatgctgcccaaggagccgacattgggcatcctagccggccaccgtcattacctgaagtctccccgtctctgcataatgcacatggttacctaccagtagtaaagattatagatatactggattgtgagttcacggtcttccacaacccgttcgccccgattggtgactctgattcacatctcatgctccgtgtactgatccgctgttgtctgatcagcctcaaggtacgtcctccatatagttgcgcataccgatgaatggctgaacggaagcttgaacccctccaagaccgatagcaatgagtaggcacccacgacaatcttcatcctgagattgcaagtatgccaaggcctacgcgcccagggagtagatatttagtaaagacaacataagtcagctgcgagtagaaataaaagtcagcggcgcgagcctagagatgaagggttgactctagtgagaccaaaatgtcatccggccaaccccaggtacagctcagcgtttccgtcgaccacaaagtctacagcccattatttcggcatctgtcgaagcacttcaaccctcattaagaaatggtaaccgtggttaaaatggggacatgtagaatgtaagcgcgttaagcgatttaattgcaaattcgatgatatgtacgaaccatacgtttgcggcgttgctttcttttcaacagttgatgaaagtggttcaccatactcaacgcacaattttaagaggaagtaggccaggtcgagacttgagtctataggccacaaagtctccaaacaccccttcaacgtcgttgaaattacttcaacgcttattaacgagaccgtgactctcactaccaactgcgcaactggttccttggtagagacgtagccgaaaaatataaaaggagcccgattcccagcccaaaaaaattcaggacttcggtcctcacactccggtatgtcatagtatccctctcttgcctgcgggcttgagagtctccgtgaccacggctgtcgctgccacaagcccagtgatgtaagacttgcgctccctcgctgccacgagccccgcgagtgtaaaaaggtgcttcgcaggataggtctgcgtgaacaacaatcctcgcaggggggcgctgcgttaccaagtgaactccgcagggggacgctgtgatgacaagttctccgcagcctaggctctgcgtcaacaactgtgtctcgcaggataggctctgcgtcaacaactgtgtctcgcaggacaggctctgcgtcaacaactgtgtctcgctggataggctctgcgtcatcaactgtgtctcgcaggataggctctgcgatatcaactgtgtctcgcaggataggtctgcgtcaacaacaatcctcgcaggggggcgctgcgttaccaagtgaactccgcagggggacgctgtgacgacaagtgagacccgcaggagaccgctgcgttaacaagttcctctgcaggagaccgctgcattaccaagttctccgcagcctaggtcctgcgtcaacaaagcgcctcgcagggacatctgcgacaacaagagtctccgcagggacatctgcgacaaaaagaccctctagcccgtgcaggcacctcttcgtggtgctagggaccagtattcgagtattcaagtactcgaagaagcaaagacctgcgcaatatcttcatcgtctgttcattattccgaagggtcatcattggatactagagggagccctagttagatcttcgccaattcaacagccaagatcataaactaacaactgaagcgtcttcagtatcaaatgacgtatttcacattcttttcccttggtagcttgtgatccaatagcttcctcgctacaataggaattggcatctttcattcagatgtaggcaaacagagatgagtgttgatgtgagtgttgatgtgagtgttgatgtgtgttgaaatatcccggttgctgagataataatgaggctgggatcacgtgcatacatatatacctgttcaccagcctacttgtatcttagacaacatgcaacaataacacacaatcaactcccattcataatatgaacactgaggcatcacttatcaatcaacaatgtgagtgttgatgtgagtgttgatgtgagtgttgatgtgagtgttgatgtgagtgttgatgtgagtgttgatgtgagtgttgatgtgagtgttgatggtgagtgttgatggtgagtgttgatgtgagtgttgatggtgagtgttgatggtgagtgttgatgtgagtgttgatggtgagtgttgatgtgagtgttgatgtgagtgttgatggtgagtgttgatggtgagtgttgatgtgagtgttgatggtgagtgttgatggtgagtgttgatggtgagtgttgatggtgagtgttgatggtgagtgttgatggtgagtgttgatggtgagtgttgatggtgagtgttgatggtgagtgttgatgtgtgtgtgttgatgtgtgtgtgattgagcgtggtggtgaatggtcgggcggtgaaggaggtggtcaccgtctagaccttgccatcggtccatgccaccctcagattatgtaagattcctgaatagggggttcaactccaacttctggattaatcggttatttacgtctatcactgtcacccaccgccataaccactggtatagtaggtaatcgatcctaataacggtgtatcctgttgtataatttattatatatgttgcttttatgataaatttattagtgagactagtagacagtatgatgtgagtggatttgtaggttcaaccttttttgtggtcatatatatatatttacacacatggtactcgcatcactatttctatttattttagttcgcactcccaagtttcattcagactagactcaacagtccgctgctttgacaagcttggttcaatccaactcgtccattatatatccttccacccaactaatccgaacacatagtattgtgggacctgtacgtggctaaaatattgtaaagtaaatacgtgcgtcaagggcttgttaacaagcgacccatgggccaaccgccaaccaacgccatgcccgcccatagacaggtggaagtaactcattgcgaatccataggcctcgtgggccgagtcgaggtcgatcaatatccccagacgtagcaaggaggttttcttgccatctcatccacatgatagatgtatcaatttattgattctatctcgtaagccatctctagtgccattctgatcactcggtgaatttgcatacagcccctacttcgattaagctggtcgaatgcaaaccccagactgccctccgttggttcaactatgtataggcaatacatacgctcaagatcagacctaccaggcatagaagcatttataaggaaccgctcgaaataccattttgttggctcaactaaacatcgtgatgcgatagactctgccttcttattcaaagtcatcgcttcagtcggcgattgcaagtcacttaagcctactctactgtaggatggctatatcctagaaccatcccgagtgtgaaagtggattcgcaacaaagaaaaccaaccaagaatatccgatcggctcctacattcgggagtcgccgcaacattgtaagtaatccccccgttagtaactacaattcatatcgccagccgtaccccatgtatcaatatccagtactgcgtccaaaccgccggtcgttgctttctggggcgtagtacccgggttcatgcgatcaagcttgctctgctgccgatagaacgcagcaggatggctctgggtggtgttattacagactaaaactcatcttcataaaggatctgcttgaacaatgatctgtcaaatatcgtccagggcgtggtgagtttgacaaatatatacttaatgctgaaaggatgccgacgctggtggacagaatccgacgaggcccctggcaggagctgcttacgcgataggttagaaaacgacatcaatagacagagacgcgcggccagcttagtgacctgcagtttcagtgacatccaaagcatatacgactttctggatagttgctgggctttgatagagaaatgtgtgcttgggatccaaatacaccaagcacctgttccaaggagacatttctgactccgacttgatgtagctccgtatatttccgcttggttcatttccactcgttcgtatgtgtcgaacgcctgagcaacacggggtacgaggtgggacagtatcggacggtctttttggctctttagttggctcggctgtgcctcggtataaacggccttatcttctcggttcgtagctggtaccgaaattagcctgtaggatagaaacgaagggagttttgcctcaccttctccttgcacgcggatttggactaacaacatggccaacggcgaaggtaggaatcccctgtcattatgcaagacgagacatcggcatttctcggcgcctgccagataatcaggcttgaaaagatgccatccgagaacgtggggccacccattggacgccactaatccaattcaggagggctattctttcaccgtgttcgaatgccgaaagacacacggtggtataagccattgggatttcgcgtatgtatcgcgtagacgcatcagcacatggcctgaggtacagagtcgactgagagagaagggcgaaggtaaaggcgatcagaactttacattggctcatcatcgatgccaccaatggtcatgtcggggtgatagagcgtgggatcacatcggtatcggggagcccgagcagacaatgcacttgcgcgcttcgactcgagtaacgggaacatgagggtaccccctatcgtacgatccgagtcagcgaggcttgaaccactaggacgagtggttatgacttaccagttcataaagatcgcagaatgtttgcttgcaacgagacgatcaattagatggtgatcatattatattacctaaaagatcaattataatcgtcttcatcgatgtggtcaccattcatgccatgttgacatgatgttgtacccagaccgtcgcagtctccggctgtcgcttcgaagaagccacgctgggtacaccgggcaacttctgagagccaaaggcgcatgacgaacccacctgtgataataaactgtacagtcgtaatgggataagacctcgggatgcggacggccagaggttcatacactccgccgttcatggtatgaaggcggtgaggtcgaaggcggaagacgcgatagagcacgcgtcgtagtgatcttggtctttatctccgacccgggataaaaggactcctcacaagtatgtttcacgggtggcgatgggctgctcccatttacaatagcatagaaatcagtaatggtgttctgttttggggcacaaaagttttcacaaataattggatatagcttgtagatcggcgagataatccatgactcacatgttcttgtagccaagtctagggacgaagagacggcaaggagctgtgactcttacgctcgtgcattgtcgtcgaatgtcctcggttctattgaaatcgcatcgtcttcaggatcagtgagacaggtcaggctaagattcacacacctggggcgtggatattcgagctctcaggaatgcacacaggggctgtacagtagatcagctgaatctagtgttgtggcggagacctcgtcgcgtagacactttgaccagctaacccaaaactcgtatctttgatcgcctggcgtgaataggagtgcatctggtggagatcatatctctcacaggtactgtctgacttgctggtccatgatgtattctataaaagtcagtacagcggattttagtactcgatcaaaggggataacctatcgaatgcctcggacacaagcctgctcgactttgcgtagtcaagtgaataaattgtagagcaaattgcagggcgcaggggacgtatttatagggttctcggctccttctgttgcgcaagtgcttgcttgggagcaagcattgaaggacacctatcctaattgaggcctgttgaaacccatgtcttctttttaccgcgactatttgcggcgacatctttgatgcctttagatgttcagtgagagagacgagtaagagtggtgttgagaaaaagggacggtgagttggtcaagaaacgttggctgactgttgaatccttcacggccctcttaaatttggactttgtgggagatattcaatccgcaatgacaggcccatatttcttgttctgatcacctcatctgtgcgactcaacgaaaagcgcctaaaatttcatcactagaaaccatggacttgttcttcctagcctcgcttcagtgttgtgttggttgtgttgagttgtgggtctctcccgtctatactgcggaagcgaggtcacggtcggtcacggtcggatgtgcgggtgctcgacccgtcaacccgttgaagcttggctatacgttgtcaacactcaattttcgaacttgtgaccatgaagatatattaagacttttttttttctcgttttcttttttgaacctcttttttttggtgactgtaagttctacaatgttctgttcatcgagtttctgacactttcaacgaaagtgggagaggtgtctgattgaaatatatatctcaatgagggttcatatctggccctcaacatcgtgaggcttgatcagtttccccgacgattcgttgacactatcccttctatcaaattgactgccaaccgcccgctagaaataaaaaacaaattccatccaaaagctgagtgcgttgattgactatgtggtgaccgtaaaactcagtctatagccgtctgcgtctgcatattctataagagataccaaggctagttggaaacagtactatccagatccttgactttctcctgtggacaaaatggactccccaaacagctcgccagaccaggaaaagcaaggagaacagcagcccaatgaattgccaatccttaatgataaggaccataatctggagccttcagatcatgtccctccattggtaagtgaaacccttcggcttcgaattctttggctgaccatcgtagacctccccttcgcaacacgaagaagaaataagacataccttagcaaccgagccgtttcaacccacctggaaggtgctagcagacctcgaacgcgacgatcccaagtttgcatttccagcagctcgacttattggactgtatcgacgtctataggagtcgtgtatatccaagcacatcgatgtccaaaagattgaccagagcaatgagatcttaaaggaggctggtgcgtacctaaggaaagagagagacggtcttcagcttcaccacgagaagcagctagctcaactgcgctttttcggacaggcactggaatcatctcgggaacgacttattagcctactcgataactggaactatccctatagtcccaatttggcagggttatcagacgttgcaagagaagcgtaagaaattgcctattccgggctgccctgtcctatagtggcgatatagaaatactataagcggcagacgcggtacaaggggaatcacaccgtatccaaagcaggttatatattcccgaggctttttataagaagggcatcaaatagtcattattcattatcgtggtcttgactgaaatgagtatacaaacaaccccgcttgatttagaccaatctcaatcgtaatgactcgatatattatatacaaaaaagtgtgagtccagggatagcgtcgggggaaacctagtcaacagagaatgtatcgagagactcgaatatagtagagattccgtacaaggccaaagggatagtcggaagccagtgtcggttacacagatatcatgccaggtaattgtatctagtagctatctgcgtatccgatagagattccccatagccgtttcaacccgtagcaggaagaacagaccctttcctatagtcctatcagatactcggtcaaatcgcataaatcgaaattctatccagtgcacctctttagggaaaaggagcgctaatatatggaggaaaatgtcgctagcccgagtagagttggccagatgatctggacctgtccacttaaacccggacagactgtcgagattaggatagaagaggcattcgatcaaggaaggctcttaagtttcgtattctccagggtcgtctttgccaaaagaatcctgccacagatcattaggattagtagcgagacagggaggcggtgtcggtataccagaagattcataccagatagcgtaaaggtcgagatctaaatcgtagtctgtaatattagcgcaaactcctatcaaagaaacgggtatagaccattctcgttcaatccgttcatttctggtatatgactggccgtcgaacgctgtagggaaatatagaggtatataaagcagcgatttaacgtgggttaggagggatagaaagctggagactgagcagtttttattcctctcttattacacagaatcaggacaaactagggggatttatagctagatactaagttatcgaatgcgttaaacgtatcaatagcgtgcacgttggtacctgtcactaacccaaggaaaattcaccagcagtataagccttaactctccttagagaaaacagaaatagatagcgggaaatcaaatgtcattatttctgcccataaacgctctaccacatagagactttactaaccctcaggctcctcggcggaggaggcttaaagatcgctcgcttccaaggctgaaacgacactattacaaagagcctgaaccgctcgcttacactcccacaatactgaagcttacatattacagagctgtagaagagtatcgctatcgcttactagcaagtcatttgacgcttaaagccgtcgctactcctcctcgagtcgtattttctcggccgatttgacgacgtagcattaccatagacaaaagtacaagtcaagcaatttgaggactggtatagcaagggagtcattgaggtttactactttcatgaattccgccgtaagggtaccgcgtattctcgctgggatctattcagtattagtggggttttcattccctacggtgggggatataaccgaccttaggttcgatggttgtgccgtttgtgacttgctgtggttagttttctaacttgggttcattttctggagcttaggatactcggcactgtctcttggccggccgatcaataggggaaggcgaagtgggatggtccattttggtcatcaagatgaattggatctgaaattacgcttaaggcgcatttatagctgacaattcacacgaggctgctgttacttctactagtgcttccttacctaggatcgaccgcactttggaaaggccagtgaatagttagctcaactgttgatactcgatcttaccggctgctcacgaatcatccaacgatatacgaaaagggagaaaagagttaacgttaaaaaatcgttacccgacctactgaaggtagtttataagtgttcttgtgacgcgttgaatgttagacatcaagtagacctcggtgaaacttaaccgtaacattaatttaactgcaaatcatttagaacgaaggaaacagatataccgcgtttaagcttaatatcgataccaattgacgttagtaaccgcggatctcgcattgtggtatagacctaccaaaagtagatttcactagctcttctaggctaccaatccttagtgactgcaccaaaaggttcgatgagtgttatcatattattttgttttggataggcctccgggcattattggtatttcccagatccaaacgatctcctcaaactactgtcctcccacgtaccacgagcacgttaactgtgagatatgaggaaaacttgtttttcgagatttcagaggcttaagcgaaagctttataaattcaaatatacttttctcagtatcagccgatcaaaatctctcccagagatacctgccgccgcttccgaattggaatacacacgacgatcagccgccccatccccagaggcgtccccaaatgacgttaacagatcatgaaaatgagacaaaggcaccccgatcagttttaatctactaccgcgaacattcacaaagcagactgaaactaaactcttttagttccacaacctatcgggtcgtcgtgcgagaataaagagcctttaggtagccattctgtacaaaactcgtttgtaagggaagttgagagaccgcactgcgtaggcgagtaacaaactttcgttattcgtgaattgcatagtttataccggatgtatgtaacaactgtataattgaaaccgcttattatctggagaatgtctggatcctcgatattcacggctcgggccaacctaaatgcacctacctaagggtatatcgtagtttggcttcttcaccaggtagcctccggttttgaaaaaagcccattggggtaaacggctgtggcaacattgtgggatatgctggttggccattaatgtaccagtggagccgaatcataaggctctgagtgaactgtgatatctttagcttgatctaatagatacaaaaatcgggtggcccacacttttgcccgatagcgataacgtctgcactcaaagaaaagtaactgctttgtagctaaggaaatctcctgctgcgctagtagatacactaacagagggccctgaagcagctgaaagcataatactccatttgtccgggagtcaagcggcacagtgttttaacaatgattcccgtcatctcccgcccatatgcaccgctcacggtgcaagggatcacctaatacttggcccaatacccattatagatgagcaggattgaaggccataatgaaaaagtaaatttataagcgtctcgttccaattacgaggtttgtatgtaagcagctggtagtccccagcacccctcatcttgttcctgaaaagcggttattatttcctgggagctctagccacatttgtcgggatacgcgcgaggcatatataatgagtggagatacgatatacgggacttacatggcatctaggttcactgggatatatatgcgactttccccttataactgggcctcaagatccaagaaaccggcaaataattcatatagcagtgtagcaatagagcctaggggacccattttaagggggaacataccacatatcgtatccagagccttcggtcttaaagctcataacccaacacgctcttcaaaatacccttaggcgactcgcagtttgccagctataccattccgcgaatgcacggtctaaatgcacggcccactgaatccaaagagtgaactagaatgagatatccttcttacaacctactgatcagcggtatagcggtagatactgcatcgcaatatattcttcgacgttttgactgtttcaagcgagaatttccatgtcagcagccctgacacaatgtaagtatagttcccataatgaaggcatataaagctagcgaggaaaccctacagagattgcgcaacatcaatacctattcgaatctttttctgcctttatcatcagcacaatatcctctgtcctaccttagaacccatttgctgtctgcgggatcccttatagtggtcctgtgtcctattgcggggtgacgaagaaaggcaagccgtgcaaaaactctgtcaaggttcaagacactaagatcggctatcaaaagttaaccactctctccagagagccatttgacctatcaactttgcagtcaaagctctgcaatattgctagagtctttctctgcgcgagatagcaccgtcaacggcaggccgactaagttagctagcggtagtataaagcagccatccgcaaccaggcgcgagtgccgcatagctctagagttgccgctccatctattacacatctaggccagcgtcagatattatcagtctccaggagtcgccctgcattaggcaacaccgacaggtcaccttacaggctcagataagacccaccagtgcggctgtcaactaaccccgagccagtgcagccattcaatccatttatcacttctgcaatactacagacgaacagtgttccatggcatatttcgccggcttaaccagctatcctgacatcggtcgctaacatctgggctggtatccaaagcttaacgctcaaggatctcaccctgagcgacaaggtcgacgacatctactgtgtattttgtcttaccgaggataaagatcttacaaatgaatgtgtgatcttacgctgtcagtgtaaggcgctttcccacctagcctgcgcggaagagtggctggaaaaacgaagtacagtttttgggacgtcatgctatatatggtaagtagggctgattctgattatccaatgcccgaggtgctgatcaatacagtcgaaacgaagggcctttagacgcttcgattcgcccactacgagtccaatcgtcggatactgagacacatcatatgcgcacggcaagtgaatcatctcccgagagagaacctgccactatcacgaattcatcactaaatgacccgagtcagagccagtcgcgtcagcggtcagtgggaccccaagggagatcagttgagcagagcgtggaggatggcccccgtcgctcggctaggctaggagctcatctaccacaaggcccttctacatctgcaccaccccgccggtcagcacgactaaattccactcgaaggtgatctttgtcacagcggaggtgtgacacagtcggcattgggattagtatcagagagcatagccatgatttagaccttggagtaagcttagaaataatacaaatgaagtcctgaacgttcaaaatcgcagagcaccaaaaccacgcgaccttttcatctttgcaagtactagatgccaatacacccccaaaaccggttggcagtttcgcttaatttcggatattttaagatcgaaaccatattcatacctaacggtggtggccaaagaattgtagacatggatttatctcagtggagcgtgtcgcgtcaagacggagattgttgacagaagaaacacatctcgggccggcaagagactctggcaaactcctatgctggttaggttgactctcggaatcaatatgttgaatctgggaaactcaaaagcatttctaggatgtcaaggatatacattaagcatgcggaacggatggagatatgatccgcaggggacccacatggtgtacatgggttcacctgaacgcgaggaagctacctttcttttgcttcctcgcgctgcgtcttgtatctggagtcaactatagttgtttttgatattgattattcatcttgaaacactatccacctctatgtatacgtgagaccccgccaaccccgccaaccccgacaacaaagacaacaaagacaccatgacctccaagtccaacaatgggaatcctaacgctcgaggagcagaggaagtagaacggagaggacggacaaaatcaacgcactgagcaatcgcgcacacttcgtgccatctttgcccatagcttgcttttcatatgacttggacgaatgatgtggtttgtcttcatatcctggttcaaaagtgtaaccctgcaaccgttttttatgtccctgcccttgcaggctggaccataccatctaccaagcgcatgtggatgcggtctgtagtcaggatcccatttcgcgatatcggatgaccgaagttcctttatcgccggatatctgtagtaacagtattccgagtagactccttgttttgtgttggtgaaaaccttttccaaaggtagctttaccgattcatgacattcaataacatcgtaaatattcaaggtaatgccagacgggaattgcacctcatatctattcttgtcatatttccagccatcctgaagagcggcaaagaacttttcactttcgtatctgagatcgcctgaataatcacctgcgataagagcaaggtagagacgggttgacgattttctgggccgataggcgctcaagttatggccaataagaactggagaacatccatcaaatgtcagagcaaactccagccaactagtatttttgaagatctgtttccagaggatagaactggtgtttatgatgttttcgacatctgctggcgtcagaaagtccttgatacttaaccaaatatcaagtggggtttcaaagagcttcattgtgaatgactcgccctggtgccggtgttgatccagatcgtaccagggaaagtatttataacccacagcgctatttcagaaatgccttaatcttacaaaataacaagcaagagtcctacatttttgtcaggccctccgaaatgcacctatacctgtggttatagagctggtcaataacagaatctatcctccggatttctctgaaagttgcggtggcctaattccttacccatccgaacctcccttatttgcaccctagctcaaatagatattttccataggcgagaaaacatgctgttgatgttcagtggttgtcatgttcaacgttccgaacgttaacatcgattttctgacaccattcaccacccgtacatcgccaaaggttgttatctgagaatgttcagcgaatgtatcagcatgatactaccaggctgttgtgccccagtgctacaggaagcacaaacaagactccgccggtcgcttttttctttattagctgaatcacgacgggatagcaacccacgagatatcggaaatgctacgcccttccacatgtccctattcactaccaattccaatctagcagccatgtggctcccgggaatacactgtaaatcaattggtggttcgggcaacacgtggtcatggcaactggattgagacatcgttgattggatcgtcttggtctacgtaccgtgattgaggcaacaaattaacatccgcagtcctcctgggagccggcaccgatgttgctaacccgcgaaaacttgacagcagatatctttttcatggtggacatcaagcattcaaatgctcatgattgtcccattgtggaagctattacacccttattttcctcttgccagtgcagcaccatcaccagcaagaaggaatcatcatggaccacaagctgtcacaggtatcaaagggtccgataccccagacatagaagaaaacaatggactcacatggcaaactggtatcgttatcttagatccccttctcgaggaattcatcggctgacaatctatctcgtggaggcaatgaaccgactgaaagcttccgtcgggttgttggccagtttatcctcggaaatagcggccacacaagccaggttttacagccatctgttgaccagcccagtggctctgtagctacagagttagctacttctgttgttagctcgagggactatatgatcactccaagcgccatgaaggctgaaagccacgacttgccccctctgaacgtgaaaaagagaccagcggaatccccaaccttttcacgaaagcgacgtcgacattcatactccagctctcaaatactgggccgctcgcagacttgtgcatcgaaagagactcccaagccttacaaaaattagcaggcaaatgataaatgatacaattcaatacctgcaaatgctatctgaccacatcttgatctccgacaccattttgtttagggagtgggccactatgcatctcgccacccaattgctacaaagctggtacaaagatatcattgcgaggtaggagatggaattagacgccgtatccaagtgtactttgtcaccgatacagccagaagagaagtgcacgaagtgtgctgccgcggatgcggacgagctgtatgattaagaggttactcctttactacctcgttggctatcttttgatagaatagctggcccttttggaaatggacgagaaaatatagtgttttgcaactaagggacagtatttaagatcttgttaagctcctagtctatcagtccgcggacaaagaacattcaggtgcggagaccactcgacaagcaaaaataaatatatatgagccagctgcatcttgatctccaaataatgcaatagcgactaaagatgcctagagtacatgtatgtaccagaaaaatcggaattggaaggatgaagcaatagcattcttcaaaatgctattgccttgaatatcaattccagccactctttggttattcagcccgcttcactcgtagagatgcaactttttgtgctttagcatctacaataactggaccatttttgccgttctgttaatcggctcatgactgctggtccttacaattcggctgtttggcggtcattctgtgtctaaatgtctgcatactcattcagatgaaccaatatagaacagcttggccctatcattggtaagacaagaaaatcagagcgccggggcccaatcagctgtgccagtattcgtccgagaattgtgagagagcgactcgctgtgctgaaaagccagcttccaagccaaaggcatacctaaccataaccaagtccaccgaattctctctcttcacctggaaaacatggtcgttgcagcgttaactagatgctggtcgcatagaagttgcgagtggtcattacatggccatgtaagtggagctctgtgcaacgcaataattacaggcaagtttgccacttcatgagcctaccaattattgtaataaccacaccatgcctgatccggtgcgctcgtcgactcatgagcgaaacataaggccgccgttacaaagaagctgccgcagactctgactcgtttgatagcttccgtctttatttttggcgcgttgtcggtcctagggaaactagaatttgtccgtggacagtattccctagcgccgtgtagggtaacaagatcctgaaaaagttgagttttgagcagtgcggtcatctgtcaattcgcatcgagtttctaattagctcgagactcaggttcattatggctgacagtttattgtcagttataaaaggatacacgcgccgttaatggtttgtatgtaagctctgtggctgatcggcctcatcttacgactgtcagtcgatgctggcatctcctatcacgaccgagagtcgaatccctaacatcgcacgtacaaaacaaccgaattgcactttctctcttagttcttacgttttgaatccgagagaacaccgccctgtcatcatgtcatccaacctacccaaagacaacatgatatgtgaccttggcactatcaaagctcaatatcagctccccatttcgatgtcggcccccaccacccgcgagagttatacggcggccaccacgaatttaacaggacctcaccgccgcggtagattgaaggttgtcacggggcctcccaaaagcctttgcctaccccacttgtgtggcctggagaatatcgcatccgtcctgattgtaagacaggagtcaccgtgggatacctatcggaaagtcattacgtatgagaatgctggcaaagttacaattgctacacgccgcactcgcccgtctcgcatggtagccatccggacatacgggaaagacaatgctcgaagattgatatacagattcggacgtctagaacacaggaacgttctctccttacatgaatgctacatgcacgaagatctcgcgtccttcctagttgatgacttgccgctgacgctggctcatgttgtcgcttttccgtctttacatgaatgctacatgcacgaagatctcgcgttcttcttagttgacgacttgccgctgacgctggcgcatgttgccgcttttccatctgtttatcctagcgagacagaattgggatccattatctgccaggttggtccctcatgcccttcgatgagctgttctgacattttagatcctggatggtgcctgctacttatcttcatttggccttgcgcatcaatcactggcctgtggtgatgtattatttggcattgacgggatcatcaagataggtttgttaaccgccgcattcttgcattatctgactaaaatttcgcagcaagtttggacctttatatagattgcacgccaaagcaatctgaaattgcatatattgcggctcttccgtcgataatgatgcggctcatgcagaaaaatggcaaagatcaaggccttgttggcgtgaatgatctggagcgatggccaatcgattctgccgctgtggagattttgtccgctaccgagacggcagaatcaatcaggtcgctgagaaatgtgagttctcctagcaaggtatcgtgtttcgctaatgtccagtagcaacccctgttggcggagaagcaccgcccaaacgatgatctggtggtcctcgcaagagcagctctgctctccactagcttgaattgtatttacgaccccggctctaaaaagtgctaaaggacaagatctggtacgcaactcagatatccgcgaatcctcgtcatggtcataggcttcaccaataagcaacatttcatgcgtctcctacagttatcttgccacttcttagggtactttgtttcttccacgacataatccattgtttttgcacaaatccttctcatgttgcgttctagtgaacttagtactacataattaacgttacattgctggtgaaagatcaaggctaacattgaataccgtagggacttctggtgacatgcgcaacctttgaagagccgagtgtaaagaatttcatgcgggcaatctccattcgataatgaagcctcatgcattcttttggaggagctcacaattttcctactaaaaataaacttagctcttcgaagcccaattcttgagatcgcaacggcactgaattgttagacgtccataaattttaaggcagccagaacgcaagaagtagggcggggaaacagccaaactaatgtgaaggtttcagaagtacgtatgtatgtcgcttgcagacttcaaccaatggtgaatactgggaagctgaaacaactggtgagcaacggcattcaggggctatgtctccagcttttattacccccagcggccggttagtgatcgtctttaacactctaaagttgagttggaaagagccagcaccggttggttcatttcaccgctagtgaactagaagggttggttggcgtacgagctatccacgccaaccctattgtttctcgcctccttccaaatttccctcgggaccataacttatttataaagacctcccctcagcttccactggtcttcatgtttgcacagaacacagtactttgaggttattatttgcaacacccaccacaaattccatgcattacattactgccctttccttgatagcctccctcctgggaatggtagctgccactggaaactcagtccgtcgatatgtgcaactccgtgcttggggtcagcccggctgtcgtgctagtaaccttggcgaggaaggtatctacagcgattacattggtttatatatgccatttagtaattacaatataatccgctccgtgagcgttgagtctgtcgaatcaggatacactcgtaagtcccggtaatttttagactgtatattaccactaataaatttttagtgtacatttacaggaatctgcagtatcattctgaacggattaaggttccttttataaaatgcgttagtggcgaacacgagtataaaatgtacatattggtatacgatgactgagatgtacttcccaggaagtggtagctaatcgaatgcataactaggagatatggaaggctgtattaaactgtattgtacttacctactctgtctcatttgcaccccaacttatgtaagagggggtttttgagacctatactacaaccgagaaaattacaggaagataaaccagtcagaaattccagcaaattaacttctcaagatgtcaaaatggcctcctcgaacttgatttaagtaaattaacctttggtttcttgatacaccaaacgcacttgaccgtcccaggttgaccacccataagtgtcggttgtggaggattgaaagaggccagctatcatatatataagctgacaattcgttgaattattttcctttgaaggctccttagcgttagtcaatgttatcggcaatggaagtcgtttaaaatgttgccgtatccctggctttatgctctaaaattcctcatgaagcgttcttttcagcagacgcaatatttctttttattataagctgcccccctcatttactgtatctttttgctatccgagaatggatacacgaaccagtgccttaataagaggtcgaaaactaatgtcaatgacaactttaaaggcgttattcttctgatctatatctctacagtactagtcatgaatataaataattagaacttttccagcctccatcaattgccacagctattactcgcactgaaatggccccaagcgctctacggtccagcggccaagtgccaaaagccattctgagctaataccactactcagtaatggttctgaaccgccacagaaaaagagcactcgctataatacacacgcttacgcaaaatcactacctccagcacctccgggatgaacccggactcctcgaacgcggatacaaaataaataccacggagcacaggtgtcattgctagtaaagccaacagaccaccgcggcgggatcaattgtcataactggattctacagatgcaaaaggccccggccgctcaaattagtatttcgaagatacctcacttttagatcgggatgggctcaatgtaggctcaagataggctcagggtaagctcagggtgggctcggggtaagctcaaggtaagctcagggtaagctcagggtaagctcagggtaagctcagggtaagctcagggtgnnnggtaagctcagggtaagctcagggtaagctcagggtaagctcagggtaagctcagggtgggctcggggtgggctcaggtgtggccagattggtctcaactccggtgaggggaaattctgtaagttccccgcactgtattgtcacacttggttatccattacccgccactcatcgctgtttgttttgtatggtaactttacatcataccggaacaatatactgtaatacaccgtaatcgtgccacgtcgcccatcatggaccattttaacagaccctcaaatcaattgtctttatcatcaattggtcttcctcgatactgcatcctgcatcttagtagtgtccagtatccaggcggatatcattaatttgtctgtaaagtgcggggtgtatatcaccgttcgaacacacttgaagcccggtgcccgttttacttgtcgtttcaatctagtccttagctgtggtactatactacagtttcatgattcggactcgtagttggcagctgcctgtatgtttaagagcacgacatgacaaaggaggcacatatgacgataccccgttccttccaccaacatgacgtcttttacccgaaattggccaggtttatagaggcgaaaatcaaacattcttgttatacggcaaagaccagctctgccaaaatttaaacgaggctacatgtcccaaccaagataaaaagtatcgcacccataaccctgaactacgaaattctccgataacatcttcaggaagtgaggaaacggaaacttcttcctattcatgccagaccaagggctgttttagaagagcgggagacagtcccatacaccctttccgtatgattcagtagcgcggactttgactccaacttctccccgcaaatagagcactcatagtacatatcatttgaaaacggcttgatatgcctgttgacgaagtgtcggctcagagatccagggttcttgtacatccgcaagcgctctctttatggcagactagggctactaaggtaaatgaagcagatcgttggtctctctgttggagatttaacgtaaaccgaagcgatagccttcgaaaacatatcgtcgctcttatctgaagcggttggattctaccttttagacaggggggcggctggtagcatatcgatatcatcggcggagcgtttttaggtgatacgacgccgcgagggtataccctcttctgcatcgcatactgtaatcactatattaatcgcagcaattcgacgcttatattctttctcgatcgtcgtacccggcatcgttaggacagtgttaataagtgtcatatgctgcggtatcatatagccggttcgttccagtgcaaccaatacttcttcgtcaacaacctttccggaaagttgccgttcgctatcgatcactggctgctcgttcttataacgctccaggttctcacgaatcaagaggttccgttgccgccctttcttattctgcagttgcttaactgagcgatcatactgctcgtctacattattaaacttttaccatagctttttcactctcttctcttaagctttccgtcgcttacggatcgttcagggttaagggaagttcctccgcaaaagattattactaaactcccgctgtaatgcagcctaggcattttcatatatacgctttttagcatctcggtcttatttccgcacctgcttcctctcttctagagtgcggacacgtggaatgttattgatatagcttgaatcctctagtcgatagggtctgcagggatcaatggaccgactcatcgagcaggcaaactgtataagctgcttctaagcgggcaggccccatacaattgcctaggcatctacatgaatacccacgctgtagtgtcgaataaacgtatcgatactagcatactgcagcataacgttctgtagttcattggatacatccgctgattaagaggaaagtattagtctagggatcccatcatatacgttatttcactcacgactgtcgttgaacgcttttgctgcaccgtatcggaggcaatatggcttcgcgacttctgcgaagcccgtaatttcaccacctcgtttcattcagtaactcagccatcccctagtaagtctttcttctagtgcgatttaaatcccactaggctcgcgtagtacttggtaaaacacgttttgactgagaattttgtctttcaattttaattcctgctcaccaagtctatagaggacccgaagacggtacagtttctcagggcagtccatcacagggccgtccttggacagacttttaaatgcgccaatcctaaagagtatacctagcagaaagacataaggactgagaaccagggtgggatcaaagatgatttccggaattgggaacgtattcctatttcaaaatggtaagcaagctttgactgggtccattggcggaagaacttcggcatacagagttgcgcagagaaaatagccattaagtgaaaggggaaggaaaggaggaaaaaagaaaggggacgtcttacgactctttctcgccaagaaatgtttttgtgaattccggcctcaaataaatgaaaagttggggccgtccaccatttggatctcgaactaaggttagcttaaggtcctggaagcgaagtttcaatagtgctcccggacggctaccggtgatagcggctagctagcagaaaagaaggagttgtatccggtaccagctataaggaaaggtcatttctgttgtggataggatcactcgcgcaaactcggccacatcttcgacatatatcgtcgctttcggtcgaccttttagagaaagacctttttctgtcgcaactatcgcaagcacctatagaaagtcagccgcgtcaactgatattgatatcgatactcaatcggaatctcacgtcacggatcttaacatagacatctttactgagctcatatccaacctcggccttgtagatcagatgccaccacttccaaaatgcatcgagcgtgcttttggttttcactcccgcggtgcgacgacgtctatcctttccccgtcgctggtcacaccgccataagaagagagccttgaggaagcggaccgtctcctcgttatcagaaagccaatacaaacattccgcaggatcgcgcttagtgcccttgcagaacctagaacaatcagcgaaccaagtaaggtagggggatcttaaagtgaagtctcacttatcccagaaatactgcgcctcatccaatctctcttaggttttcgggctgtagcgtttatgtcgaagctgggaaacatcaagagactcggcctcgtggaggtaatattcgggtggaagttgctcctcttcatcttccgatgctaggtcatcttcggactcaacttcagactcagactcggattcgctgcttaagtcgaagacactgggtgcggtggaggaatcagtatcggaagcgtggtccgaaaaattctcagaatggcatgggctaatatcgctctcatcgccggacggaatagaaccacgagatgccatggcaggaggcgatgggtgcgatcgagaaggtacaagaaggcaagtcagagaatagggaattggtagtaaccggttctcttttcatactgtggccgtgccgttgaggagaccgacctgagagtggaagggttgcttggtagcaagaaagaatattgtgtcggggccatggccgttgatatttataaaatctgaaggaaggagggaaccaaggaggggagccatcttcggttcctctgcttcaggagatggatgagggtggggcggcggcgacagttgctatagcagaaggggccttgttcgggccaggtaccaggcacagccaacacaaagcatgggtggcagtagagagagtcggccgtgtgcattgaggcacgtgatgccaagcccagagacggtgagtggagggcttaaaacggcctccgaggcggccatttctggcctcccattcaccgtctcatacttatgtgtagtattgtttagcgcattttcggccttatcagagccttatactattaatatgattttatcgaatattatatcggcgaattctgggaggtacgagagattctggattcgttcttagagtgtatcgttaatctaaacgtacagctagctagccactatatataactagtattcctatctatcaaatttcgggttacctacagtggggcgaggcatactgctgttaataatatattctagtctcaatggcgtgagagcgaatttcacagggatcgcctatctataaggatttctggaattgtacttgagtgctttgactttctgtattttcgcagctgagatgttaggtaggttagtggcctgattcttcttattgtatccgttacccgatgatattgtgttggcctggggttgagaggtgtttcctatctcctaagacgcgttgttgttgcctgatggtaaaaattgtgactgattattcgggttgtcatccccagagtcgacactgctatcagctatgctgggagctggtttgccaattctgttgttaattgaggcttgcgaggatcaaatccgattggcgagaaacgcgcgttgtgcgggttaagcgccgggaagtgggatccaggaaagagactcagggttggaggttgctagcggtccttgctagctagagacaagtgctcataacctaatggcgtatctgactacgttgtacctgaaaagggaaaacaactagtgtagattcgctaagatctaaatggacgagggagagggagagaggaagagggagtggaactatctgatgatctgaacccacatgggtgaccgccttccggtcacccaacacatgagcctcattttgtatggttgctggaatttaactacagcccaagttatcaaataggtttatgcgaaatggtcataatgatatctctaaaatacggattgttgtgacgcccccaaacagagacacgacgatgcaataaccactatgtgacatgaaacatttcgaaagttgtttggaaacgcgcagattcttcgctgtgattgacatgtgatcatctgcctcaactgaacgtcccattagcaggcccaaaatacccgacagctggcatcgacttgtatggtacaccctgggcgtcggcagtattcaagtacctgtctgcgtcagttgcgcagcgtgccgaggcgcttcataagtgtcctgcgttgatgtttgttgcgtagctatctgttgttcactgcgttctggagtctgttgagttggtgaagagaaaggatactggtactctgtccttgtctgttctggggacggagtgtcttcccttggagttgactctcgtggggagctggtttccctgatcaagtcctgttcaatcgagtctgcgtactggtgtacttccagcatgtccatctcttctgcgttgattctagctgtgagttcctcaagtcttctctggaagttggctttcctctctgctagcttttctgtcattgtaatttgctccgtctgaggggttgcattctcactgtgaacagtctgtgtctcctcttggattggagtaagagtctggttgactctttgcgctgttaactgttctgtgtttttgggaattggtgtccctctctgaagtctcccaaggatcgatcttgtgtgccttggtgcagggagtagcctctgtcgacgaggcattaccggggtctctggtatggttgaaacgctgccttgaattgtgggcaagtgaattgttgacggggttactggatcctgtctgtagactgttacaatctctgtccttggttcggttctggctgcgtcgatcagcgggatggaaatttcgtttgtgtcgtcatctcctgggggtttcgatggctttggcgctaccggtactcctccctcctgatcttcgtcccctggttgaggaaagctgacgtccctcgagattgtaatcttcctagtttccggattccagatttttagaatatgtccgttatccccctcataacccatgaggtgtcctttccaagatcttggagcggctttgcgtgcctgtactctcttctccttcggaatatgaacgtagacggttgttccccatggtctgaggtgcttcagtgacggatctgggttgtcgattccgagttctgtgcgccagtgtttgagtggcgatgtttgagactttgggttggttaatctgttgatggtgtagattgcagtttctactgcgtagggccacagctcctcaggtagcttagtatcgatgatcatcgttctctgaatgtcgttgacgtatccgccgaagcgttctaccgcgccgttgggctctgccgtgtagggtggtgtaacttcgaaagtcattcccttttttgtgccccaagtgatgaagttcttaaattctgttccaccatcgagtctccatattccggggtagcgcccagttcggagtttgattttttcgcaaaatgcttgaagcttgacaaatgcttcacctttgttcgtgagagtcggcccctcgagatatcttgttgcgtcgtcgaggataggcatccagtacttttcaccgttcgggccctcaggtttcataggctgcgtgtctacatgaaatttccatgccacgtcctgaacccgaaattgcggctcacgagaaatctgtttcttggatttaccttgaaaacatgcttcacagtcgaagtattctgttccatactgttcttcgtcgtcaagctcttgtgcttgtttcagcgttgaagtaagtttggcttttccagcgtgtccaaagcgtcgatgcgcctcaaaggcagaaattttattgactaatcctgtttcttcgtcactgtccgacccgtaggatgaatcttcttcgtgtgaatcgtcttctttaggaccgatgaggtacggaaccccgagtgatgtgtttgcaactccaacggtttttccagtgccgtctgtaagtcgcttagttcttgtgtcatacgagatatcctgttcttccaggagtttctgcatgccgaacaatttgccgtgaccccttgggctgtagtagccttttgtcaggaaggtgtatgttgttccgtcttcgagacctgctttgacaaggacctctccgtgtccttcagttaccactctgttgccggagtagtcccggtaggcgtatgccgattccgggctgtcctcctggtatgtgtagaaatcttcgaagtcgtgggtgagtgttttgtctgatccggtgtcaatcagccagctgttgaaactatctgtgtgacgagctgttgccgttatggccatattgcttcgcccctcgcttcgcagtgcgatcgagtaattccatacgtgtgggctgtgtgtccagtgtgcgggtggatcttctgacagataggaacacttttgagctttgtgtggcccgaaaccgcagtaggcacacatcccgctctcatccctttgtgttccttccttcttttccttgacatactcatggatatctttaccaggaggtggttggttgcgaagggtcttcttcttcttgggttcgttggatgtacttgagtcatccttcgaagatttgttgtcttggcttgaggaggcttcgctgttacctcctttgccgcccctcttaccacctcgtcctccgcgtcctccgccgcggttgttaccccgtcccctcgaggactgggctgcgttagcagtcccttctctgtcggaaactgcctggaggctcttgcaatattggtccatcttttcgagtgtgattttcttaggttcgatattactaatctcctcgatgatgaattgaaccttggatatttctttatccaattgccgtagaacttgtgatagtgcgtgaaaagggtgtggttgaattttgaatcgcgaaagaacgtggtattgtttctggtattccgcaatgaattccttcgcagtgttgaagtccgctcgtttcatttcgtcgaacttttttgtttcgtttagcgcattttcggccttgtcagagccttgcaccattaacatgatttcatcgaacattgtgtcggcgaattccgggaggtacgagagattctggattcgttcttggagtgtatcgtcaacctgaacgtacagccagctagccactgtgcgtgaccagtactcccatctgtcaaatttcgggtcacccacagtggggcgaggcatgctgctgtcaatgacatattccagtctcaatggcgcgagagcgaatttcacagggatcgcccatccacgaggatttctggaattgtactcgagtgctttgactttctgcattttcgcagccgagatgtcaggtaagttagtggcctgattcttctcgttgtatccgttacccgatgacattgtgttggcctggggttgagaggtgtttcctatctcccgagacgcgttgttattgcctgatggcaaaaattgtgactgattattcgggttgtcatccccagagtcgacaccgctatcagccatgctgagagctggtttgccaattctgttgttgattgaggcttgcgaggattaaatccgattggcgagaaacgcgcgttgtgcgggttaagcgccgggaagtggggtccaggaaagagacttagggttggaggttgctagcggtccttgctagctagagacaagtgctcataacctaatggcgtatctgactacgttgtgcctgaaaaggggaaaacaactattgtcgattcgctaagataaaagtggacaagggagagagagagaggaagagggagccgaactatctgatggtgatctgggtccacatgggtgaccgccttccggtcacccaacatcccccctacagatctcatatctcctgttttgaaaatgatgatctagaaatgtcgtaatcgtggtagtcgtaaaaaaaccccaaattttcctttgaattaagtcatcccgataagcttcaagaaagctcggaattgctctttgggaagcgcctttgtaaacctgtccgccgcgttctgctttgtgttaacccttaggatatttatatgtccttgggccatagcgtcctttataaagaaccatcggagtgccagctatctggtagtagacttgcctcccttctttattagtagtaactgtgagttgatgttatcggtgtagataactgtgggattgggtcttagtaggctcagtgagtctgcaaccttagtaagctatatagtatcctgggccggctggttgagcgtataccattctgctattattgtggagttcgctgtgattgtctgctttttagtagactaagctactgggactcctgtaaagaactagatatatccttcggttgatttggagtctgtctagtctgtgtataatatatctgtgaatgctatgaattgtagttcgtccgactttctaaagattagtcctatcttagggttatgtctaaggtatttgacgacgtgtcttattgccttgagattagaaaaagtcggtattgctagtctatattataagcgtataatagcgaatctaatatctggtcttatcttaatagtaagctagttgagtatccctactactgtctggtagtattcgaaattctcgttattaagtagattagagttaatgtcttctgggttagactctctctatcttggtagtagtggtatttctttcgtccctgtagtatctgtaatatatagaatcttttgtatgtaggcttcttaagatatgataatcgtcctattgttgtaatctctgtcgagtatgtagttaagatactgttttggttctcctaggtcttttatattataatgtttcttaagttgctttataactgagtctatttctctggaagtaggtatagtaatgataaagttatcgatatagattattatgattgttagatctgcgcagttctttcttatcttaatgtagatatatgggttgtcctcgaggggtctaaagctggtttatcgaagcttatagtctatttccttattctagaggaaggcagagtcttataggccgaaaagagtctaattaagtatatatacctattactttgaatttccttctgtatctgtaaactcgaagcctattagctgtcttatatatactgtctctgtatcttctcttaatatattaaggtaagccgctgtgaaatctacttaatgctatttaagactatagactgcgataagtattaagataattttgattattatttccgatataactagtatataagacttgcttaagttatcgcttttctcctagaagttgctgtagataacctatcttaccttaaagctgtagactttatctcttgtgtttgtcttaatggtaaaacgctattgtcctggaaggacttttgcctttggtagttttaggattaatgtctatattcctttcgtggtaaggttattaagctgtttttctattacttccttctatttgttctagaaaggtgatttttatacttgtttaaaacttgatagtaggttgatatccttattgtaaagaggttttctattatagataaaaggtgtgtctatatctacctaatcggagttatctagagaaagtttctttgcgtttccttcttaagaagtgatatgtttttctatatgcctggtatctctcttttacttcttatattcgacgtttaggagtttttatttaggattctgatatctctctagtaggatactgatatttcttctttttaatctcttagctgaaggttcttaaatttgagttagtactactattactggttctgcggtaggtataataggagtaatcttctcctatatctatatcggttgtatagtgtactgaggcgctttataagtactctgcggtaatatttattatatagcagtttcttataaactgtattccagagtctgttaagttagtaaagagaaaggatactggtactctatctttatctattctagggatagagtatcttcccttagggttaactcttatatagagctggtttccctgattaagtcctattcaattgagtctatatactagtatacttctagtatatctatctcttctgcgttgattctagctataagttccttaagtcttctctagaaattagctttcctctctactagcttctctgttattattatttactctgtttaaggggttgtattcttactataaatagcctatatctcttcttaaattagagtaagagtttagttaactctttacgctgttaattattctatatttatgggaattggtatccctttctaaagtctcctaaggatcgatcttatataccttagtataggaagtagtctctgtcgataaggtattactagggtctctagtatggttaaaacgctgccttaaattataggtaagtgaattattgatagggttactagatcctatctatagattgttataatctctatctttagtacagttctagctatattaattagtgggatagaaattttatttatattattatctcctagaggtttcgatggctttagcgctattagtactcctccctcctaatctttattccttagttaaggaaagctgatgtcccttaagattataatcttcctagtttctagattctagatttttagaatatatctattatcccccttataacctataagttatcctttctaagatcttagagtggctttatatacctatactctcttctctttcagaatatagatatagatagttgttccctatagtctaaggtactttagtaacggatctaggttatcgattccaagttctgtatactagtatttaagtagcaatatttaagactttagattggttaatctattaatagtatagattatagtttctactatatagggctatagctccttaggtagcttagtgttaataattattattctctagatatcgttaatatatccgctaaagcgttctactgtaccgttaggctctactatatagggtggtataactttaaaagttattcccttttttataccctaagtaataaagttcttaaattctattctactatcgagtctttatactctggggtagtacctagttcggaatttaatttttttataaaatacttaaagtttaacgaatgctttacctttatttgtaagagtcagtcccttaagatatcttattgcgttattaagaataggtatctagtacttttcactatttaggcccttaggttttataggctatatatctatataaaatttctatactatatcctaaacccgaaattgtggcttataagaaatctgtttcttagatttaccttaaaaataagctttatagttaaagtattctattctatactattctttatcgttaagctcttatacttattttagtattaaagtaagtttagcttttctagtatatctaaggtatcgatacgccttaaaggtagaaattttattaactaatcctatttctttgttactatctgacctataggataaatcttttttatataaattgttttctttaggactaataaggtatagaactctgagtaatatatttataactctaacagtttttctagtactatctgtaagtcgcttagttcttatattatataagatatcctattcttctaggagtttctatatactgaataatttactataacctcttaggctatagtagccttttattaggaaggtatatattattctatcttcgagatctactttaataaggacctctctatatcctttagttaccactctattactagagtagtcctagtaggtatataccgattctaggctatccttctagtatatatagagagcggctttgtgtgcctatactctcttctcttttagaatatagatatagatagttattccctatagtctaaggtactttagtaatagatctaggttatcgattctgagttctatatactagtatttgagtggtaatatttgagactttagattggttaatctattaatagtgtagattgcagtttctactatatagggctatagttccttaggtagcttagtgttaatgattatcgttctctagatattgttaatatatctgctaaagcgttctactgcgttgttaggctctactgtatagggtggtataacttcgaaagttattcccttttttataccctaagtgataaagttcttaaattctattctactatcgagtctctatactctagggtagtgcctagtttagagtttaatttttttataaaatgcttaaagcttgacaaatgctttacctttatttgtaagagtcggtcccttaagatatcttattatattgtcgaggataggtatctagtacttttcactgttcaggcccttaggttttataggctgtgtatctatataaaatttctatactatatcctaaacccgaaattacagcttataagaaatctgtttcttagatttaccttgaaaataagtttcatagttaaagtattctattctatactgttctttatcgttaagctcttatacttattttagtgttaaagtaagtttggcttttctagtatatctaaggcgtcgatataccttaaaggcagaaattttattaactaatcctatttcttcgttactatccgacctgtaggataaatcttctttatataaatcgtcttctttaggactaataaggtatagaactctaagtgatatgtttataactctaatagtttttccagtgctgtctgtaagttgcttagttcttatattatataagatatcctgttcttctaggagtttctatataccgaataatttgctgtgacctcttaggctatagtagccttttattaggaaggtgtatattattctgtctttaagacctactttaataaggacctctctgtgtccttcggttactactctattaccggagtagtcctagtaggtgtataccgattctgggctatcctcctggtatatgtagaaatcttcgaagtcgtgggtaagtattttgtctaatccggtattaattagctagctgttgaaactatctatataataagctgttactgtgatagctatattatttcgccctttactttgtagtgcgatcgagtaattctatatatataggctgtgtgtctagtgtgcgggtagatcttctaatagataggaatacttttgagctttatatggcccgaaactgtagtaggtatatatcccgctcttatctctttatattccttccttcttttccttgatatacttgtggatatctttactaggaggtagttggtttcgaagggtctttttcttcttaggttcgttagatatacttaagttatccttcgaagatttgttatcttagcttaaggaggtttcgctattacctcctttaccgcctctcttactacctcgtcctctgcgtcctttactacggttattaccctattccctcgaggattgggctgtattagtagtcccttctctatcggaaactatctagaggctcttataatattagtctatcttttcgagtgtgattttcttaggtttaatattactaatttccttgataataaattgaaccttagatatttctttatctaattactatagaacttgtgatagtgtgtgaaaagggtatggttaaattttaaattgcaaaagaatgtggtattatttctggtattctgcaatgaattccttcgcagcattaaagtctgcttattttattttgtcgaactttttagtattatttgacacggtgagcggggggccagaaacggctcccattgcaccgccgtcctgccgccctcgaccgcctacccgtctccgccacttacttaccatttacggcttagcgtcctcatactccccccgtttggggttagtgcccctctggccgcttttatcgcgcccaacgcctgccctccatctataaaacaccgctcgtcctcttcgcagctttgtcgacgcactttcactttgttttcccatctggccccctttccctcggcccccaccaacttgtccgcactggcttgccacctcatgtaccacccctttcatttccaccggggatgccgctcgatccaccgttgagcccgttctggccggcgttgcctgcaacgcgggccgatctcttgcgagttgatgcatcgagatcatgaaactcatgaagataccgtgcaatatgatgctagcttccgcgctaactgctggttatactacgatgatctcgacttgtcctcctgttgcaagcctttctcgccgagcgcctcgcacatttcgcatttcgtacatttcgctggtgttccttgcgcggccaaagaacaatgtctcggaaacactcggcatgcgcgctctgatttgccacagtccgcgcgaggttgcattgtccggcccccaatggtgagagtgcagcctggtccgctcgttcgagggtgcctcggggtaagactgtcgtcatagtccgtttcacttggccgctgttacccccgctgttacccaatcgacgaaaattcggacgactatgccattgtacggactaatagcgaaattgccgcattcttgcctgatctaaattaacgccaagtactgcgtcaccgaggccgacgatggtctattctacagacggcccctgaccacgcgcatagatgggcaactggaaactgggctgacgaccactatggaactaggttacgttggggcgccaccgaggtgtgcggaagcttttgccgacggccttcggtctctgttgagcagccggtgtggctctgcgccttggatgaaacgcttcgggctgaatgatatagagggaattctctgcaccgcttcactggcaattcttatctataaaagagataacaatcctctttgcatggcttatgtagacagagacccatcaatccttccccctctccctttccccttacccctgctctgtatcctatacccccatttctgagtgccccgttcttataggttcgaaatatacctataggattcttctggctatctgccttttcacaatatgtcgagcaccaattttcgcctggaattgtttcgtccatggaatcctttccaagacaaagcttagccattgcgtgatccctctgggacttgtcgctacccaagtccggtctcgatcactgccaccccgctaagttccaattctagcgattatggcccaaaaaagcaaaatattctttgccctaaacctgagcgacacccccttcctgcccgcccgccgacggaagtctgcttagatgggtagaattcggaggtttaaaccactcgaccgggatcggagggcttgggccaaacactttccgctgttagtggtcaggagccctttaacttcgagaacatcttgcaaccacaaaacatagatggtggcgatgatgtcgcttctccaagttttgccgatgatatctattgggaaagagagcgtgaattcctggaattgggattggatggctcggatcctgtcgattttgcccgtcagtatcctcaaagtgttgatcttggaattcctacttagaatggagagcttctaaattttgagaacgtcgatcctgcaatccttgatgaccatgaatctccggttgccgaacaggctgaaataactatggatatcgctagtatcgtaacgcccccggaagaatgccccgcggtgtccattcgccctcagaacaaggtctcaactctctatcgtcgacggaatttaaaggggatggtggacagtgaccgccagcccacaaaaataaagaagggtttgggtacgggaaaaggggatataaggattggctctactcggcctaagaaaagttcgggtcgtcagagcacttctttcactatagtctgtgcccaattctcggcccttttagtcgaagaccgactacaattcctgtcctggctttttgagggtgcgttaactcattgtgcttctgctgttgcttgtccctcaatctaatgtgatggtagaagcgataactgtgtttatacgagcttgaatactgacgcgactgatgtgtagcacgcctcttcaagaaagggactaaagtggtctgcggaggaagatcatcttctaaggaagttaagggacgagtaaaccctcgcttggtcagaggtggttaagcaattttcacgagaatttcctgggcggagcgaggggtcaatcaaagtgtactacagcacaactttgaaaaaaagacggctatcttcccctattgttcttattgcttgacatgattaacataagatattaccggtagaatcgtctggagtagctagaacattatgagtggggatgctcagttgtataaatgcatagtcgaagacatggtggtattgtgggaccggtggtctggaatttgtctggaatttgctcgggtatcataatatttatgttgagattttgtaagatattgaatctagtattcacttcctgttggtgtggtataactgcagcagcgttggtcaaatccgagttttagtacggaggcacataggtttccattttgaaaaataaaatctcgatgcgcctattagctcgaactagaagagggtaccaagacgctggatgcctggactaggtaggatggagaatggggcattaatgatatgaaacgctgggatgtgtattgagagttacgctatagttcttccggtatgtttgttttaccatatataacacgtaggcgttgggatgggtactgatgaccatgtacgacaatacaatgcggagaactcgtggtatttttcccctcatatacgattacataatcccggcggctcagggttggctcagggtatgctcagggtatgctcagggtatgctcagggtaggctcagggttggctcagggtaggctcagggtaagctcagggtaggcttagggtaggctcggagttagctcagggtaggctcagggtaggctcagggtaggctcagggtaggctcagggtaggctcggagttagctcagatttacttcaatgacccaatacctcggtaggtcaatcaatgaccacgcaagcatcaataaagaattatggcattgccatcgcgttcccgctgctcaaaagtcccgtagcaaaaatggaaagagatagagaagaaaaaaatccccttgcgcctttgagattattctattgtagggatgatttacaaatgggtatcatacggctgagcttttgaagctatttagggaacatgggcgggccttccactgtgcaaccgtcgtgggataggatgaaagatgccttcaatactttcgattggtggcggagacgaaaatgggaatcgcgaagaatctggattgtgtcttgatataacgctagagagccttgacactatatatcatgcgaggtgatcattgatgtcgcattgtccaggatagataatcctaagaccagatgtgcggctatccctttaaaagttaccgactgtggtgccggcgagtcagttctctctgttgataagcgtctcatcagagcatgtatgagtttcttgtgattatcattctaatccaatggtggtggaagggattctcttttattcagcacaaggttttttttttttttttttttttcccttttttgagaattgggccaaatacgaagtgaaaaattgatgtcttgatataacgctagagagccttgacactatatatcatgcgaggtgatcattgatgtcgcattgtccaggatagataatcctaagaccagatgtgcggctatccctttaaaagttaccgactgtggtgccggcgagtcagttctctctgttgataagcgtctcatcagagcatgtatgagtttcttgtgattatcattctaatccaatggtggtggaagggattctcttttattcagcacaaggtttttttttttttttttttcccttttgtgagaattgggccaaatacgaagtgacaaattgaaagaaggaacaatgaggaattagcagatgtgatagaattaaaggattgatgttgacttattcaattgttttcaatcttcctactaaaaccccttgggaccgcttactgtagtctctagtctccagcagtaagcagaccccagggtagctgtggagttctcacatatacgtagatgggggtatcattttccggatgaatagtaaatattaagaaatgctacagtcaactctagatacaagatatagcgcgagaaagtaaaagagacaggcttcctcgcatttaggggaacactatgtgggtcccgcaggtcatatccctatttagcccgtatgctttatatatatccttaacagcagctgaggcaattcccgggatgaataatgcaactcccagaatactcttcttgtttactatatatcgagaaatccctttgttagggcttgagtatattggaatttccggtatgtcgtcaacgggcatatattgtgcctttttggccggctggcgtatggtatagcccaagtatcagcgatccgtcacagctctacgaggtatccttagggattcactatgtgtatcctagaatgcatggtcggtactgtggagaatatttcgattgctcctagaacgagagaaacatttcctgggagcttgtcctggatccacaatccgactgtagttattaaggaatctgacggtatattttaggtgcaatagcttatgaggctagtagatattataagtagtgttcctcctacatttaaatctccactagtatatacattgccgtccgttgtttcgaatatacagccagtacactcaactttctgcgttatagtactactatcgtaccacttacaagtaccacggcttatctgtcatatgttgttgtacccggaatttcgaatagtgactatacattttgtataagaggcctagattaatagcgtgacttcttcagcctgttctccaattcctctaatatgtctcttcgcccctgtcagctatgccgatattcgagaattcgatgcagccgtgaagttccttactgttaaacttgcgttaagcgtggtaggtactctttgtgcgtctatgaaacaaaagtgtcagaccaaaaacctgctcttccagagcctcggtcaaagtagtaaaagtaaaagcaggaacgagcatctgacgagtattactttcgacggagagcttttgagccataatccgaacagttttcccggtacgaaacgagtataaatgaagagatgtaatacgtaatggagcctgtaaacgaagaatatatcaagcacatgagttaaagatattctgagcagggcagtttattaccttatgagaccctactaaagggtattgcggctgcgaaagcggagaaagcttcgattttctaaccgaaacatgttgaagatacttctgaacggccgcggagtataccagtgcctcaattaatagagctctatgcgtaaatgatccctccggtaatcaattctaactatgaggaaatatagactatgacgctaactgtcaataaggcttctttgcctctacgcctaaattttgatctgaccatatctgggagatatatttgcggcccacatacggcctattagctcttgttggtattacattatctttttatctctttaatgcttcctgtagatataggagctctgtggaaagttatatgtcgccgccactatgactgggaagagagctttgtcctgtaacacgagcagctttaacagtggctcatcagtgtccgcaatatcttgaccaattctgatgggcttcatacagtaaccttggaagacatagagcgccaaacaagatatattctgttcattcttggggagaatatgtccccccactcgagctttatatttgaatgttttagaagcgaggaacccctataccggccgtttggggtgagggcaagtattgctttgatttgttatgcctttggtggaatctagtccgatgagcttgaaggatatgaagcaaaggaaatttggacctgcgatcaaaactttctgtcgaccatggctttccggcttaaagaatcgctactgtttggcgccgaagtttcagtgaaccatttatagtctatgatactaggtttctagaaggcttttcagtgcgaagaaatctgtgtttccgggatggagttccaaatattaagaatcgaaagcgaattagaagtgctgggatattaccgatgggcatttctagcttttaacccaattcttttaccaaagattctagcctctttgagagaagtgaatgatcttactaccctactatggcactatcagcttattaatatagagagaaacttggacagaagtaagtgaatcgatctttaggctgatatggtgtttaataagagtatagccaatttggccttacgtctcgccaatatatttatatcactggcaccagaacgcttggacgctgcgttctagaatactcgcgagattcagctatcaaaagcggacagagtcgtcgctatggagatgatgtacgtcaagttattcgaagaagtatacaagttgaaccctactagtaagttcttatattttaaattagaaaaaggaatttctaattgttacagaacctactactgtccgtgttttctatgtttcgccgtgaaaatgcgaaggggtatcggaatgcttctcttttaatgaattcaagagttgtatactataaggaatgtgttagaatctgggatttgtgttgaaataatcatttacaaagccttacgctccggaaatgagtctatcgaccttgctcttacgaattaaccttctattgcttcttataaagggcttgaatagaccctttctccgtcctcgtaaatagccattaggatgtataagaattaacagcgccttttatcttaaatgctagcccagtgacatccctagcgtcaaatatgaaattcattcgatgagagcctaccgagctgttatgaactcgaaggaaaggaatcgtataattaatggaaattcaccaagtgccgaatatggttcgtaaaactgcaaccgactatttatataagatatagtacgagaaatccaaagatagagattacctatatttagggagtctatatgtattatataggtccggtatattatatctctccttatattatagttttatttgtgtatgtccctgaaacccttaagtctatatagatgggacagaatggttagcagaattttagttggactggccagccttttatcttggaagcctttttgagaatatcaacttgtaacgagaagtattgttgaaagagtgcactaaatgagatacacgcggtgaataaacgctgataacgaagatataacgttaatttaattagattaaccgtggctttctctaaaatgtgtattgaaagttttctgtgctagtaagagagttgtaatgtttagtaaatgtatagaactattttgtggagcctattaaactttattaattgtagttcttgttcttgtggaaatcgctttcctagattatctttatggtaagctaaagttgaatattcgtttagtgtctggggggatgtatagaccgaatagatcatcgggaaacattatatgttgaagatgtgctatatgttcactatacgtgtactaaagaaagtcatctaagtcaatactgtacgtgtatattaatattgcttcctccctgctgttagctagcctttcaatttaagtatagtaaatgctggaaattctcaattcgtaactcagttccctactttattcttatactcctactttggttctacgtcctatactaactaccagaatgaagaccgttatatccctttttatactggctgcctctgctattattacgcctgttgccggtactttatcccctgggcacttcggccttaagtctatcggcgctactaaccaagagtataataacctctatgtttacgcatactatataggtgtaggcctcaatgatgccgtcctgactaaggatgtgaatgccgctagctccgtttacttgaatggcataaatgccttcttcgatttgaatactgaactgctttggggagttgtagctaccggtgataataaatatatatgtgagtgcctgcccctagaaagttgtgtactaattttgatatgggctaacgaaaattccacagcctgggaacgaatcttgataaacgtaggccaaggaagcaatgtatttttagccgaaggcagtagctttatatggtcggaagccagcggcttcggtggatggctcggtaagaccccgttatcgttgctcttctctagaagcgatctcgtcctgatatttcgtagtctgtaattgttattacaatgcgccctagctgttctatttgaactgtaactacaacgccactatcccctctagctgcagtaagatctaactgaaggccgagtatatcaattagctttagtagaattgggtttgaccgctttctatagccctatttattgcctaatggcttatcttctactagtctgtagcgagttcgagggaaaataatatgaaagcgattactcaaatttgaataaggctagggttggcttctatgctatgcgaattacgctagctaaatgtcaggattctaaatatataaatacattaagagaagtaaaaggtggaatgagaagcactgcgttatatatggttaagtttgactgtctctaccctgggagcacagaagcagctttaagaagcacaaaagtcagtcccttaaaaagccgacttagcttccaaaatcgtgttctcttatattgggtaaccacagttacgttcttatggctagtttaatcagctcctgggttattagttgaggtttataggtctataactgggccttctgagaacgatcgaacgtcttaggtttgtgcggagctctggtgagggtgtcgtgtgaggactctcctcaactcttagaggaagagattgactctaggacttagaagtagggtagggttctaggagtgtagcagcttccaaatccattctatctaaacctaaacttagatttacttaggaacgtggtctgaagattctaggggtaaacttttagttgtacgagatatatagcttctatacctgcttttgaggtttatacggctaatttaataatctctacggcccatttagcctatgtacttaaatgttcctttgtgcttttagctagtcctgaatcttcaaagtcaagtgactctctacttcatagctcaattctctatttcattatcaaaattccagtataaaccataatatatataacctatatcttctaacccctaaaatgaagttcctcgcattcttttttatgctggctacctttgccatcgccgtacccgtcgctatttcgtcctctaagcacttcagaccctcagtgcagtaatctgagtaccttaaaatcaaagaaaatatgattgtaacttacgacatggtgctatacatcgtcatacatgataccggtcttgagaggggccagaatctgcttcgctatgatcatattgatgtcaaccctaaagaccggtggctcgaggatattttgatgttggtagctaagggtggacatttccctatcgcagacgggttcgcggtggatggcagacgaaatgttggcaatttgaaaagaccgttgtattctgtgcggaatgcattcggagggccattgagagtatgatggaataccacaactattattaatactctttggcgccgttaccgagaggaaggtttggtggtctctaagatatggtagcattaatttcagatagctcccgtgatatgcaaggtgggcttttctcggtataaatactctttgcatattattgaggtgtatatgggacagagtagctaagtgccatatatcttaatgcggtcttccatatctcccagttatgtattcgatttgctaccgtttcctaaaaagtatatattagatatcgcacaacagtttgtatatttatactcgtatttaccactgacgtatttgttaagaggaacctcaatccttttaaaatgatactgcagattcctgtaaatgtacactagagatatttctgtggtaatgtatagtctacagatttccagaacgtacgagtgcatcctgatttaatagacttagtgcttacggagcggaccatattgtagttattcaatggtttatataaaataatgtacagtaatcgccgtagacaccttacttgccagtattactagcacaaaagccgggctgacccgatcacggagctgtgtatatcgatgtactgggttccaagtgccaggaaagagactgttaaggaaagaccagtattgtgatgcatgccgtttgtggtgaatcttgaaaataaaaaccctgagttaatgtgttctgtgcgaatctgaaggctgatgaaacctgagggaaaggttcgtataaataagttgcggtctagagggaaatttgaatgggggtgagaaacaaagagtcgcgtcgctaagcttgtgtgacgaccagctcttacagtttactagtggtgaaatgaactaactggtgctggttcttttcaactcaacttcagatataatgttaaagtctatcactagccagccgttgggggtggtaaagctggatacattgcccctgaatgccgttgcttaccagttgtttcagcttcctagtattcaccattggttgaagtctgtaagcgatatatatacgtacttttgaaatattcgcagtagtttagctgtttccctctatgttttacttcttgcattctggctgcttaaaattcatctattgtggacgtctggcaatccagtaccgctgcgatctcgagtattgagctttggaaggctaggtttatcttttaatatggagattgcgggcgctccgaaagaatgtatgaggctttattatcgaatacagattgcctatatgaaatcctttatacttggctcttgaaggctgggtgtgtcaccagaaatcccctcagtattcaaagttagcattgattttttaccagtaatgtaacgttaattatgtagcattcagttcacaggagcgcaatattagccagcagagtaacacaatgaattatgccgtgtaagaaacaaaaagctctaatgtagtaagagaatagtaggaggggtgtggaatgttggatattggtaaagcctacgactaggacgagaatccgcgaatatccgagagtgcgcgctagatctttgtcccttagcaagatttagaaccggggtcgtaaatacaatttaagctagtggagagcagagctgctcttgcaaggaccaccaaatcatcgcttgggcggtgcttccccgccagtaggggttgctactggacattagcgaaacacgataccttgctagtaggactcacatttctcagcgatatgattgattctgccgtctcggtagcggacaaaaactccacagcggtagaatctattggccatcgctctagatcattcacgccaataacgccttgatctttgccaattttctgcatgagccgtatcatgatcgacggaagagccgcaatatatgctatttcagattgctttggcgtgcaatctatataaaggtccaaacttgctgcgaaacgttagccagataatgtaaggatgcggtcattaatagacctatcttgatgatcccgttaatgccaaataatatatcaccacaggccagtgattggtgcgtaaggccaaatgaagataagtagtaggtaccatccaggatctaaaatgtcagaacagcttatcgaagggcatgagggaccaacctggcagataatggatcccaattctgtctcgctaggataaacagatggaaaagcggcaacatgcgccagcgtcagcggcaagtcgtcaactaagaagaacgcgagatcttcgtgcatgtagcattcatgtaaggagagaacgttcctgttttctaggcgtccgaatctgtaaatcaatcttcgagcattctctttcctgtatgtccggatggctaccatgcgagacgggcgagtgcggcgtgtggcaattgtaactttgccagcattctcatacgtaatgactttccgataggtatcccacggtgactcctgtcttacaatcaggacggatgcgatattctccaggccacacaagtggggtaggcaaaggcttttgggaggccccgtgacaaccttcaatctaccgcggcggtgaggttctgttagtttcgtagtggccgccgtatgactctcgcgggtggtgggggccgacatcgaaatagggagctgagattgagctttgatagtgccaaggtcacatatcatattgttatctttcaataggttggataacatgataacaagacagtgttttctcgggtccaaaatgtgcaagaactaagagagaaagtggaattccatttgttttatacgcgcggtgttacgggttcgactctcagctatgataggagatggcagcttcgactgactatcgtaagataaggccgatgagccacagcgcttacatacaaactgttgacggcatatgtatctttttccaactaacaataagctgcacagccatcacgaacatgaatctcgagctaattaaggattccatacgaatcgacaaataaccgcactactcaacataactcaacttcctcggtgggggccgacatcgaaatggggagctgagattgagctttgatagtgccaaggttatatatcatgttgttgtctttcaataggttggatgatatgatgataagacagtgttttctcgggtccaaaatgtgcaagaactaagagagaaagtggaattccatttgttttgtacgcgcggtgttacgggttcgactctcggctgtgataggagatggcagcttcgactgactgtcgtaagatgaggccgatgagccacagcgcttatatataaactgttgacggtatgtgtatctttttctaactgacaataagctgcacagctatcacgaacatgaatctcgagctaattaaggattccatacgaatcgacaaatgaccgtactgcttaatataactcaacttcctcagaatcttgttacccttaacagcgctagggaatgatgtctacggacagattctaggtttcctatgaccgataacgcgccaaaaataaagagacggaagctattaagcgagccagagtctgcggcagcttctttgtaatggcggccttatgtttcgcttatgagtcaacgagcgcatcggatcagatatggtatggttattacaataattggtaggtctatgaagtggcaaacttgccagtgattattgcgttgcacagagttccacttatatggccatgtaatgatcactcgcaacttccatgcgaccagtatctagttgacgctgtaacgaccatgttggccaggtgaagagagataatccggtggacttatttatggctaggtatgcctttggcttggaagctcgcttttcagtagggcgagtcgctctctcaaaattctcggacgaatactggcacagctggtttgggcctcggcgttctagaattacctgtcttactaatactacagtttaatatagtctacaactgatgctataatgagtcacttggattaatatgctgacatttagactcaaagtgacagctaaactgccgagttattaggaccagcagctatgagctgattaacagaatagtacaaatatttcgatacttgtagggcacggagctattgtactattacgaaggaagcgggttgaataatgtaaggagtggctgattttgatattcgaggcaatttgacttgcgaaattgctatttctttattgctatccgcgattggccttgtacgcgctgtctgatttctctaatatattgcattaattggagattaagatgtagctggttttgtatatttctttcttattcctgagcgtagtgacatcgcacaggaaaccgttcaaatcctttgcacctggaagtcccttagtcatgtactgatagatttggagctcaacaggctcttaaatgccgattaacggttgtataacactataattgctcctcaagttcaaatgaccggttatgctatcaaaatatagccgataaggtaaaaagaacggggtgtgtctcagtcatacagccgctccttgtctgcagcagtacacttccgatacttctcttctggctgtgttggtggggaatcagaatcgggaacagcgtctgtttctatctctttccttacgataatctcttcgtacctgctctgaagcaattgggtggcgaggtgtatagtggcctactccctgggggaaatggtgtcggagatcaagatgtggtcggatagcgtttgtaggtattgaattgtcttgttgaccatatccctactaatctttataaggcttgggggtctctttggatatatccgttgtgagcggcccggtatgtgagaggtggagtatgaatgtcggcgtcgcttttgtgggagggttgagggttcggctgctctctttgttgcgttcagagggggcgggtcttggctttcagcctttatggcgcttggagataacgtagatccccttgagctaccaagagaggtactaacggaagtaactgcctctgtagctatagggccagtggactggctaacaggcggttgtaaaacctggcttgtgtggctgcgattcctgtggatgaataggccaacgacctgacggaagttgttagctgattcattgccttcatgaaatagatttgttagccgatggattccttgagaaggggatctaaaataacgataccagttttgcctgtacgtccattgtgaccttctgtgtctggggtattggacttctttggaacctgtgataggttgtgatctatgattggttggcttcgctggtgatggtgttgtactggcaagctattggagcaaaagaaggacaagagagcatcaaccgtgggataattatggccttttaaatgtttggggctgaagtggtcatgcccaccatatccacagttaagaatttcggggttattattatcaccgccgactcctaggagaactatggatgtcaatatgtggccacaatagtggtacgtacacacccacgatcgaatcaaggatgttttaatccagttgccgtatccacatggtgctcgagcctccaattgattcgaagcatattccgaggagcaacatggctgccaaatcattgttgctcatagggcgtgtggaagggagtcccatttctcacgacttgggggttgatccgactggccgagggtgttttgtgcttccaggagctctggagactttaacttctttggtcataattcgttggtactgtgccgacatgatagtattttttgagtgttctcattcaagcacctttggcaatgtacgggtggtgaatgatgtcagaaagttgaatcaacgttcacaaagttgaacataaaacacccttgaacaccagcagcatgtgagttttccgcctgtagaagatatccatctgagccatgttgtttctttgccaatactgggacctgattaagttttccactcgaagctcgtttcctaatcggccgcgttggttcacctaacggcgacggtttaccatggcttagagacgcatcctacactggctgttaaacacaagctcaacaaaagagataaaaaagagatgactacatctttctggggactgttgggtaggtttgcaatcaacagcaaaccgcagtttcctcgagtacagcagagtgatatatcgcaaacagaccaaggcaaactacgtcggtatcagacgttcaaatttgaaagatgtcacgcgtaaacacgacacatattaaggaggttaataatatagaaagagacgctgtccgtggttaaaacgggcagatgtagattgccaccacgttgagcgatttgattgcaaatccagcgttatgtagaaggaatcttttttttgtgcggtgttgctttcttttcaacagttgatggaagtggtttaccacgctcaacgcacgattttgagaggaatgattccaggtcgagacatgactatgggccacaaggtatccaaacaccatttcaacgtcgatcgaatcatctcaacgcctatcaacgaggcagtgattatcgctaccatctgcgcaactggttccatcgagagacgtagcggaaaaaatataaaaggggccggatgccccaaaaaatcaggacttcggtcctcacactttgatgcatcatagtgtccctttcttgtctgcaggcttgggagtctccgtggccatggctgtcgctgctttgagccccgcgacgttagaaaggtgttttgcaggataaggtctgcgttaaaaccaataccagagcctactatggtctacaagcggtgccatattggtttatctgaatcaatatgcggacatttagacacagaatgaccgccaaacggtcgagttgtaagaaccagcagtcatgagccgattaacagaacggcaaaaatgttccagttcttgtagataacacagcacaaaaaattacatctctacgagcgaagcggattgaataacccaaagagtggctggttttgatacacacacacacacacacacacacacacacacaatttattaacgcccggcggctaagccgaaagggcaactatctctgatctactatacatgtcataatatatatagtactgtgtctcctcagagcccatacataaagccttgcaatatatgtcatctcagatgtccgttagtaatttttgacggcatacagtgcgtcccgaaactggtgccaccgctacactctttcgttgtttctcgaatcacaatgccaagacccgctagtctctgtttgggaatttttccggagtacccctgtcagttgggcgtgtattgcttcttacgtaggttactactttcaagtatgtatttgcgtgtgaatcaatacgtctcacccaccttcaaaataaccacccgacggagggtatcttaacgatcaatcaccagtggttgaatcaagatgaccccaaacctagctccctcaaagcaagatcttatttatgacatgatacacggtggggagctgtccataccgcagatggcgcaggctgctggctgcaaataagagtaccatcctgagaatctcttccaatatacggatgtttggcagcgtcaaagcaccgcttaataaaggtggacgacaacgtagcatcactccagtcatgcttgaggcgttgtgcgatcacctgctcgaaaagcccaccttgtacctcgacgggatggcgggggggcgagccagcacgctcgcttctttccaagataatcggtcatacagctgccgggtgtgtttgcctgggagtgctgcatcaactcgttttgcgtgttccctacgttcgctggaaggtcattgctgtggactgcttgggaccgtgcgatattcagtgtagttgacttcattctcgggacgctttcttgcgggagagcatcttcttgtgtcgcggatctggcctgttctttagccagaacgcgcagtttattgtcttcgctcgtagagatccaccggatattgatctggtttccatttctccgtagctttctcatcaacttgtatagttggcagacgaattcctggcctgactgttgtcgaggattccttagtgtcagagccgccgctttgttgctcgtgagcagcgtaatcctgtaatctttcagtccaactaccatgttcaatgcatgtaccatcgctgctagctccgcagagaacggattttgctctgttcttgcacccaatgtaacggaaagggtcttcagtttcagttttcgataccgaggtggctgcctctcgatcgccaccccaaatccgaccagctcgttccgtgccgaactgctggttgcgatctgcactaacccgcccggtacggtcggtgactgcggagtttcttcaacgccatcctgtacgcgtgcttcccatggtgccaatgtgaacggattgatggtttccagtctttccatctcaatgttcttcagcgcgtctgctacttgatacaacggcgaacgatggtatcttctgaatttcttgatccgtgctgtattcctgcggagagggttggtttctggcagggtatgtatgtccgtccacatcttcacggctcgtctccagaagcggtgttgaacagtggcaaggtgggcctccgcctctgctacactggtcgcaactgtgaggaatgttcttacaatcgcctgcgctcctaccctttggacgcggttgatcgaccccatggccttatctttgcacgcgtgcatccagacattagacgcgtagtccacgaccggcgccaccgtcgatgtaaatagctgccgcgctgtcgctggggataaaccccgaagtcgtcgaagctccatcgcggcctccaggcccttggatgctgccctcgcaatatgttccttgtacttgagtttcgtgtccatgaggacgcccaagatcttgacaatgtaaagtagtgaggttctgatgatgcaaccacttccaagcattcaaaaagctctcttccagcccataaagtccgaaacgattcgactgaataccttggaagaaggcaatcttttataccgtcaacatggacgctcataacttagcacaaattgctgcaatctcgtcgtcattttggctgtcgggtatgtgtctatcttaagaaaatacagaatactaagtatgtcaataacacaggcgaaatattcacctactcttggggcgtagtgcccgcagtcttggaggcctgttcaacctcccagcattttatcataagggacattcgctagggccgcctttcgccatcctgggagcagggggctttgtatggttggctttggagtcgggttgttggttgtactggcgggctgcaattctcgatgttggtatcgttccatacaccttcgctttcgtgatacaaacaaactcaagcatattcgagattgcgaatgtgaaagactcgtcggaaaagcccgccagtgaggagaaccggctggctccactgctgaacagatgggcgtgtcttaatactgttcgctcgcttttcccattggccggtggtattttgggattggtagcagccttgtactaatcttgttgacttcctatgctggattgaacaaccgagtcttgtttcgttagagacaacctgccataccgctcacatcaaaatgccaacaatgtcccatgtccataattatcttagcatatcatgcatagtatgtgtcgtattggctttctgcatccaggaaaacagtgtcacaatccccttgtccacgggagtaaggccctcgattccacgcccagtgtcgaaatcgtggacatacaaaatgacgcgcaagcgctacccgtccactttctagatccagggaccgctgacatggtgtcccgacggggcgcttttggctggctgtacttgggtgacccaaccacccattttccacgcgcagtatggacggtatccctcggatagcatatctgccgggccatctggggggtatcatgtagctagctttcatactagatagcaagagcatccccagtctcgcgaacgacggcgtgggccccatggtcagcacatttattcttcactttctatagtatatgacgaactgagagagtggtcaaataccatgggccgtaaaagctgtacctcacttcacttcgattgttactcatctacagtgtgttgagaatcaagcattctccaatacaccggtggatcaatgccggtttcagaagccagcttgcaccttccagaacattgcggaattcaatccttggacttggtaaactctactactcacactctaggattgtgcaatgccattattatggcgtgcatgctactaagcttagcgaaaataaaagtcggattattcctgtattctagacttaagacttatacacatttccaatcataccatatacgttcttgaatctcattgagttcacacctctggttacacgtagtattcatccgtcttgtaatactttaacagagtgagctgcacatgctcttaattgatcccggatagatggaacaggagagcatgtcagaacccaccctttgaccatccagtggacaattaaatacaaattgagcccgtgctctactctagcagcccattttccctacccctcttgcccccaagttggaccgttatgccgagagctcgacggagatgaccccgattaggggccagtcctgtagttgtgcgtgattctcacccggcttttcaacctacttgttgttcaatcatccttctcacctgggcgacacccacccgactattggccgcacatgagccacacgccggtgagttagtagttgggtgggtgaccaccagcgaatcctcactgttgtatgtttttcgtttttgtatgaaaagagatacacgcttatgttatcctgaacgaaccttggcacacgggaggttcgcaacccagaaataggatcgtcttcttacttaagaatttatatactgaagaggggacccctgaggggcaccgacaaccctgcctgcgaaacaggtgtgagaacagagtcatcaatgggagtagtagggtgctagagaggagaacaccatggggtgactaccgagaagagaggcggaaaggtgtctgcgttgctatctaggcctcgggagtgcttttatgtcacatagccgcttagtcattctgctctggaaacccccactgcaatacatacttcaatatatatatcacgcgataatgctaactacgttctatagtttatatagtatcgctatagttatacccgaacccactactaagtacgaggggacctaaaacatattttaagtactatgcgtagactaggcccgcggctgtactaactcaccattatgacccctagattgcttgagctagacttattgtactgggcgatcagtaagtagttctttgtgcgccgtggcttaggtctgttcctataaagcgagtcgaaaatcaatagccgaatcctcatctcgccatcacctttaagccagaagatagtgggccagaaggtagtgtgcccttaagtgcaacatattgccgatacctcctgtacagagatctgcatcacgtcttctaagggaaaacccttacgtcatgtcatgtctctatcaatgttcttgcactagcagggtagcttaccatacatcttgcgagccaatcaaaacattaacggcgctacagatgaggaatatcacaaacaaatggttttcctctgtctatctttggccgcgatctaaaaataaaaccagaataaataaatcaaaatcagataagactgacaaaaatgattcggcgacaagcggggtagtctaaagacagaaacttgtgataatcttaattcttggtatatagcaaaaatatttctacactctggtgtgcaaggtctattttctctcgttgaatctttcgagacaaaacgtaggattttctctgtgaccattgaaatatcaaactcaacctccaacgccgcgggacctcctctggcgactgatcatatgaggctaatgagagccacgaacctttggggggcccacataccaatcatgcaccggttatcccttcgcattatgacatggcttaagatcattccagtggcgcaagaccatgcgctgatcttagcttgaaataacccgccaatgaagtcgacatctgaccattgatgggactggaaagttcgccagtcggcctttctcaatcaagaatactaacgcatcttatagtgctatccagagggaaatggaaaacgaatcagcagatgtgaattgctacctacaatgtctaaaactacattttcataggtcggttgagaggaatggcccgagtaacaatcaaagtatgctaaaataccttcgcagaaggtgaaacgaccctaacattagtgtagttacatcgcatattagttccgtttcccgaaatatcattttcctccgactaaaatatatatatagccttctatcctgtctaaacaacagggtaaatattttacaattctgcgtactggcaatatccactgatgtcttcattaatctttgaaaagtctctccaatgtcaacctcacgattttttccggtcccaaccgcctatagggccttttcgcaatcataatgcatgctaccttgctatccctggtactagtcaccccaatagcgggtgcgatgaagccgctgcaatgaagctactatatccaaccaagcactcaactaaaagcaaggtagaggtgaaaagaaggaggcacctcattgcaaaagtcgagattatttcgcaaattctcgtcgcaaaagcgaaggaagcagccgaaagaaaccaccagaaccgtcaagccttgcggacgaaactagcaccagaactcaatcaacgcaaacggagtaaccagttgtcctccagcgacagatctggtatgcgtgatatggatgaaaattttgaggttctatctccacgagatgtcagatccttctcattcatcctcgaaccaaccacgaagaagcggttttgtcgaaagaagatcgaactctggttgccgaaaaacccacacgagataacgatggacttctcccgtccaggaatggcacttcttagaccacagtctttgacatatgctacttctgggcccgctaagcagagcttatcatctaagaaatcctcaactaccaaaaagtctgttttgaacgcaatcgcggagccacgcatttcaaccactctgttcattggtgaaaccacacagtctggttaccagggcaagaaaaagcaagcggatttgggtttgtgttgggtgaccggaaggcggtcacccatgtagacccagatcaccatcagatagttcggctccctcttcctctctctctctcccttgtccacttttatcttagcgaatcgacaatagttgttttccccttttcaggcacaacgtagtcagatacgccattaggttatgagcacttgtctctagctagcaaggaccgctagcaacctccaaccctaagtctctttcctggaccccacttcccggcgcttaacccgcacaacgcgcgtttctcgccaatcggatttaatcctcgcaagcctcaatcaacaacagaattggcaaaccagctctcagcatggctgatagcggtgtcgactctggggatgacaacccgaataatcagtcacaatttttgccatcaggcaataacaacgcgtctcgggagataggaaacacctctcaaccccaggccaacacaatgtcatcgggtaacggatacaacgagaagaatcaggccactaacttacctgacatctcggctgcgaaaatgcagaaagtcaaagcactcgagtacaattccagaaatcctcgtggatgggcgatccctgtgaaattcgctctcgcgccattgagactggaatatgtcattgacagcagcatgcctcgccccactgtgggtgacccgaaatttgacagatgggagtactggtcacgcacagtggctagctggctgtacgttcaggttgacgatacactccaagaacgaatccagaatctctcgtacctcccggaattcgccgacacaatgttcgatgaaatcatgttaatggtgcaaggctctgacaaggccgaaaatgcgctaaacgaaacaaaaaagttcgacgaaatgaaacgagcggacttcaacactgcgaaggaattcattgcggaataccagaaacaataccacgttctttcgcgattcaaaattcaaccacacccttttcacgcactatcacaagttctacggcaattggataaagaaatatccaaggttcaattcatcatcgaggagattagtaatatcgaacctaagaaaatcacactcgaaaagatggaccaatattgcaagagcctccaggcagtttccgacagagaagggactgctaacgcagcccagtcctcgaggggacggggtaacaaccgcggcggaggacgcggaggacgaggtggtaagaggggcggcaaaggaggtaacagcgaagcctcctcaagccaagacaacaaatcttcgaaggatgactcaagtacatccaacgaacccaagaagaagaagacccttcgcaaccaaccacctcctggtaaagatatccatgagtatgtcaaggaaaagaaggaaggaacacaaagggatgagagcgggatgtgtgcctactgcggtttcgggccacacaaagctcaaaagtgttcctatctgtcagaagatccacccgcacactggacacacagcccacacgtatggaattactcgatcgcactgcgaagcgaggggcgaagcaatatggccataacggcaacagctcgtcacacagatagtttcaacagctggctgattgacaccggatcagacaaaacactcacccacgacttcgaagatttctacacataccaggaggacagcccggaatcggcatacgcctaccgggactactccggcaacagagtggtaactgaaggacacggagaggtccttgtcaaagcaggtctcgaagacggaacaacatacaccttcctgacaaaaggctactacagcccaaggggtcacggcaaattgttcggcatgcagaaactcctggaagaacaggatatctcgtatgacacaagaactaagcgacttacagacggcactggaaaaaccgttggagttgcaaacacatcactcggggttccgtacctcatcggtcctaaagaagacgattcacacgaagaagattcatcctacgggtcggacagtgacgaagaaacaggattagtcaataaaatttctgcctttgaggcgcatcgacgctttggacacgctggaaaagccaaacttacttcaacgctgaaacaagcacaagagcttgacgacgaagaacagtatggaacagaatacttcgactgtgaagcatgttttcaaggtaaatccaagaaacagatttctcgtgagccgcaatttcgggttcaggacgtggcatggaaatttcatgtagacacgcagcctatgaaacctgagggcccgaacggtgaaaagtactggatgcctatcctcgacgacgcaacaagatatctcgaggggccgactctcacgaacaaaggtgaagcatttgtcaagcttcaagcattttgcgaaaaaatcaaactccgaactgggcgctaccccggaatatggagactcgatggtggaacagaatttaagaacttcatcacttggggcacaaaaaagggaatgactttcgaagttacaccaccctacacggcagagcccaacggcgcggtagaacgcttcggcggatacgtcaacgacattcagagaacgatgatcatcgatactaagctacctgaggagctgtggccctacgcagtagaaactgcaatctacaccatcaacagattaaccaacccaaagtctcaaacatcgccactcaaacactggcgcacagaactcggaatcgacaacccagatccgtcactgaagcacctcagaccatggggaacaaccgtctacgttcatattccgaaggagaagagagtacaggcacgcaaagccgctccaagatcttggaaaggacacctcatgggttatgagggggataacggacatattctaaaaatctggaatccggaaactaggaagattacaatctcgagggacgtcagctttcctcaaccaggggacgaagatcaggagggaggagtaccggtagcgccaaagccatcgaaacccccaggagatgacgacacaaacgaaatttccatcccgctgatcgacgcagccagaaccgaaccaaggacagagattgtaacagtctacagacaggatccagtaaccccgtcaacaattcacttgcccacaattcaaggcagcgtttcaaccataccagagaccccggtaatgcctcgtcgacagaggctactccctgcaccaaggcacacaagatcgatccttgggagacttcagagagggacaccaattcccaaaaacacagaacagttaacagcgcaaagagtcaaccagactcttactccaatccaagaggagacacagactgttcacagtgagaatgcaacccctcagacggagcaaattacaatgacagaaaagctagcagagaggaaagccaacttccagagaagacttgaggaactcacagctagaatcaacgcagaagagatggacatgctggaagtacaccagtacgcagactcgattgaacaggacttgatcagggaaaccagctccccacgagagtcaactccaagggaagacactccgtccccagaacagacaaggacagagtaccagtatcctttctcttcaccaactcaacagactccagaacgcagtgaacaacagatagctacgcaacaaacatcaacgcaggacacttatgaagcgcctcggcacgctgcgcaactgacgcagacagnnnnnnnnnnnnnnnnnnnnnnnnnnnnnnnnnnnnnnnnnnnnnnnnnnnnnnnnnnnnnnnnnnnnnnnnnnnnnnnnnnnnnnnnnnnnnnnnnnnnnnnnnnnnnnnnnnnnnnnnnnnnnnnnnnnnnnnnnnnnnnnnnnnnnnnnnnnnnnnnnnnnnnnnnnnnnnnnnnnnnnnnnnnnnnnnnnnnnnnnnnnnnnnnnnnnnnnnnnnnnnnnnnnnnnnnnnnnnnnnnnnnnnnnnnnnnnnnnnnnnnnnnnnnnnnnnnnnnnnnnnnnnnnnnnnnnnnnnnnnnnnnnnnnnnnnnnnnnnnnnnnnnnnnnnnnnnnnnnnnnnnnnnnnnnnnnnnnnnnnnnnnnnnnnnnnnnnnnnnnnnnnnnnnnnnnnnnnnnnnnnnnnnnnnnnnnnnnnnnnnnnnnnnnnnnnnnnnnnnnnnnnnnnnnnnnnnnnnnnnnnnnnnnnnnnnnnnnnnnnnnnnnnnnnnnnnnnnnnnnnnnnnnnnnnnnnnnnnnnnnnnnnnnnnnnnnnnnnnnnnnnnnnnnnnnnnnnnnnnnnnnnnnnnnnnnnnnnnnnnnnnnnnnnnnnnnnnnnnnnnnnnnnnnnnnnnnnnnnnnnnnnnnnnnnnnnnnnnnnnnnnnnnnnnnnnnnnnnnnnnnnnnnnnnnnnnnnnnnnnnnnnnnnnnnnnnnnnnnnnnnnnnnnnnnnnnnnnnnnnnnnnnnnnnnnnnnnnnnnnnnnnnnnnnnnnnnnnnnnnnnnnnnnnnnnnnnnnnnnnnnnnnnnnnnnnnnnnnnnnnnnnnnnnnnnnnnnnnnnnnnnnnnnnnnnnnnnnnnnnnnnnnnnnnnnnnnnnnnnnnnnnnnnnnnnnnnnnnnnnnnnnnnnnnnnnnnnnnnnnnnnnnnnnnnnnnnnnnnnnnnnnnnnnnnnnnnnnnnnnnnnnnnnnnnnnnnnnnnnnnnnnnnnnnnnnnnnnnnnnnnnnnnnnnnnnnnnnnnnnnnnnnnnnnnnnnnnnataagaccagacatcagattcgccgtcacacgcctacaacacagactagcaacaccgactttttctgatctcgaggcaatgagacacgtcgtcaagtacctcagacacaaccctaagacaggactgatctttggaaagtcggacgaactacaattcatagcattcacagacgcatcacacgcagactggacagactccaaatcaaccgaaggatgtatctggttctttgcgggagtcccagtagcttggtctactaaaaagcagacgatcacagcgaactccacaacaatagcagaatggtgtgcgctcgaccagccggcccgggatgctatgtggcttgctaaggttgcagactcactgagcctgccaagacccgatcccacagttatctacaccgacaacatcaattcacagttgctactgacaaagaagggaggcaagtctgctaccagatggctggcactccgatggttcttcgtgaaggacgccgtggcccaaggacacataaacatcctgagggttgacacaaagcagaacgcggcggacgggtttacgaaggcgcttcccaaagagcaattccgagctttcttgaagcttattgggatgacttaattcaaaggaaaatttggggttttttacgactaccacgattacgacattttaagatcatcattttcaaaacaggagatatgagatctgtaggggggatgttgggtgaccggaaggcggtcacccatgtggacccagatcaccatcagatagttcggctccctcttcctctctctctctcccttgtccacttttatcttagcgaatcgacaatagttgttttccccttttcaggcacaacgtagtcagatacgccattagtttgaacgaggtcaatccaattcaaaaattcaaaccttacgtgtcaaaaaccatcatccgaaacctatctgagagtcttagggaacttcttaccaagcctctctcgaaaagcgatttgaaattcaagggttcgatatatgtcttttggcaacaaggcaattttggatacctcaagattggacgctcggcaaatgttcgtcgccgtttcaaggaatggtctgatcaatgtaagaaggatatgggaattcactttccagacttcacgcgagagacaagtgatggcgagcgagttttggaagaggtcgcccatatttgtcgtgtcgaggctctggttcatctagaactgttggagcacagaaaaatcgaagagaaatgcccaggctgctctcggaaccacatagagtggtttcaagtctcagatgaaaaggcaatagccgttgcacagaagtggatggcttggatgagaacggaaccgtatgagaatcgaggaacggaaggtgaagaaaaatgggtgctaaaagccagagaaatggagcgactaggagagcttagtcaacctttatttcccaaattggccccagaatctcaggttcgggaagaaagactggcttctcttcgtcctagggcttcctcttcaaccccatggcgagatggaaagaacaaattgggacggagatcaatttagctgatacttcacaatttatacttattgaacccccgattatactgtgctaattttatatgtaagattagcgggttttccaatgcttttgttattaaatagtatatatattatctctctctattagctgccaagtttgtcttctctaaccatgagatattaaaaaccatgttccgcgttgatataagaaaccaatatatataggaggcatccttctactaagagtaaaagcctagtcattagtacgagttttgtgccaacgcatagttgcattcttcagcgcatgcgtgtggcaaagcaataggagccgtcatatcgtgagtattaggtacctatatattaaagcacgacggcagatgaagcggagttttgtttgatgggagctagatatcgccttccttcgactagacaaaaactcttgctcaacgcgaattttgaaatgccaccattttctatattacttttctacctactaacatgttttaaagaacccaagattcagagaatcatttagtaaatgatcttactgcctataattctagaagaaaaattaaagatcgcgctattagcgggtgaatttgacattcctaaatgactcctacccgccaggtcaaattatcgggctcctcgttcgacgcgctacccaaccaattcaattttaaatacgaaatctacatcgctagtagtaagtagaacacctgcatcaccttattactaagtgatttaggtatcccgatacacgttgtggtatcgggatacctatttgcatatcgggactagtatccggaaactaagtgacaagaatatggaggtataactgatttcgaaaactactgtactacagtacttgatttgttactcttaaccctaccgttgccgagctggcctatacagaatattttcttgatttaaggattcagtgaggcctagaatcagtgccagatgatatatggtcgcagcttccatgctcccaggcacattattgattgccatcggaagtcgactgcatggccctggcaacaactaggttcgagaggatgcgggagcatgtcaaagttatctctcgatacaattataagcaagcaatttacgccattcgaagagacactactttaactacgggcatagcaatatatacaagatacaacgaaactatcttctggcctatcattcttaagtacgccgcgctgatcgacctagcaacgctactacccgccaagggcccagctaatagattcactatagcggaaaaagctgctacaaagaaattcatggaggacagtgggtatagctttgggtatagaaaaccagcgacagtaccactttttctagaaaaacatatacaatatgcgtaaggctggcgtttacaaaattgtcttctagacataagcacttgacgtgcatatctaacgctatgaccatctaggcgcagaggtcacctgactcaacggtaaggatgagacataagccgtgttactatcccacccacgactctatagttctcagctattatatattcccttacagtgctgtattaaatacatacgaccatagggtgtggaaaatagggcttcccgtccgctcagccgtactcaagccacacgccggtgagttagtagttgggtgggtgaccaccagcgaatcctcactgttgtatgtttttttcttttttgctccaaatttggactgtagtagccggtagtaaggaatgtgtacggtagaagtcctcaaaactgtgagtaggtgttttatcagacccagtgtcgagtaaccagctgttgaatctgtccgaggggtgagctgccgctgtgatggccatgtaactctctccctcacttcgcagcgcgatggagtaattccagacatgggggctgctggtccaatgggtgggtggcacctctgccaggtaggaacaggctttggctttatgaggtccgaaaccgcagtaggcgcacattccactttcgtccttttgtggcgcgtccttcttttcttttacatattcatgaatgtccttgccgggaggaggttggttccgtagggttctctttttcctaggctcgttggatgtgttcgactcgtctttcgaaggttttgttatcttgagtcgaggaggtatcactgttacctccttttccacctctcctgcctcctcttcctccacgtcctcctccgcgattgtttccccgtcctcgtgaggattaggccgcattgatagttccttctctgtcatggaatggcctatgtgtcgggtagaaattgccgcaagatcagagattgtacgaacgtgggcagcatgaacttcattcatagagtacggagtagtctcattctggagatattcacatgatacgtgtgggatactgtcagtatcgaacccgacaccatcaaccctcttgagtgtatcaccgagtcattatttgatttatcatattgcagtgatgtctccaggcttttcaattgaatcgtttgtagtcaacaacctcctaaacaacgactgcggaagagttgaagacagtatctctgttaaagatcatgtagttcgacatgtaccttgcgagtccttgacgtcctttctaggtggctaattcttcgagtctcctccccacatcatcacctgcacagcttgagctctttgtaaacccaagaatatcatctacagcaagatgaacttgctcgagcagtctatcaccgctaaatacaagttctagtcagccctgcgtacctcgacttaagtaattaccattggggaactcacgatctcgcttcccggtcgtggaaaacattcctccaatgagcatacatccatacaatgggcaaatatgaagcgcaagttgccccatgggtgatgttcagcagtctttcggtcgtttgcattgacttggttgacagtgcactgtgccgtcccaatgaaaaactcgcgggtagaatggataatcggaccgatggggatgttcatgtattctagcgtacgaggtggctttcatagtatgtgattctttttctgggtctatgagctggtaggacttcatctggcttcttgggtgaaacttgtgatatttgacaggtgcgtagggttgatgcagtccttcgagaatgttatcggcatgtctgttgatccgtaatgtaacctcgtatccgcgtgagttttggtcatcttgtacctggtgtaacgcgttgtcgttgatggtcacagcctagtcgattagaactgctagacagagccgtaaagctatatccccatgaagcctaccgaagccaaattcagctgtagattgggttgggagtttaggattctgtgcctaatgatggtgttgtggcacagccgaaggagggaactggaaacaccctgaggacgcagtgttatccaaaaggccttggtctggcggttagttttcatggtgaagacagttcgtatttcaaggtgtttcatcaactcacttttgagattctgctagtagaataattttctgtctataatatatagaaatatagaaatatgtcacatattcagatcccttatgagaacccgacaagaaagttaagagggaaggacgattaattctctacagacaaacagaagctacttaaatagctagtggaagcccgacaaatcaggcatcaggtagatgcgctcttaaacacaaacaattgtctatgaggtcactgggtagacacctaatataacgcttttcggatgactttggctctaatgaaaccaatatatcgatagtccgactaaagacacttaactcaatacttggaagtaacacaattcaaaagaccaaagaggcttattttcaattatcaagcaacggagccacctctaaccagaagtaatgtcttatgtgaatgagaaaaaggcaacctccactaaacacaaactccagcgcaaaataagcgagcaaatggacaagtgatgctaaataaccaccttgaaagaaaaaaggcgtcacgaaggcaaataaacgaaagtcgtggacctcataaacttcagcccgcaaaaacctgtctgtacctatggtctcgctcgaacgcatgcgagtcatctgcgaagctcgaaccctaacctatcttcatcattcggagaacagagtaataggctccggacagaccgacacactcgcgtcggggaatcggttcttcagcgtgaccatcagggccggcttatcccacaggaaataggctttctggtcagcccagttggtactctctgggcgcagggtgatatcgaagtggtagaggagcttgcagagaatgagtcggatttcgcagtttgctagactattccaagtgagaacacgttagtattgagtgaaatggtgcaatgcgtatacatggaagaaacgcactgttttccaaggcagacgcgtggaccgagactgaatggctgcaggacatctttcttatcgtccgcaaagatcgggtcagatcccagccaacgctctggcatgaacttatccgggaaggcgaagttggactcggagtggtaggaggcgtagtggtggcatgccacggctgtctgatcgggattagtacgcaggctccaaccgtaaaaaagtgaattgaagcctatacatacatcttcagggaggaaatggccgttcacgactgctccgccttgcggtacaatgcgcgacagacttgtcacgaagggcggatagatacgcagcgactcctcgataacagcagtcatgtacttcagttcttccacggcgcggaaggtcatataactgtcctgtttgaaagtcgagcggacctcggcgacgagttggctcatgacgtgtggagctgtacacaggtaaaagatacagccggatagtagggttgcggatgtctcgctacctgccacgatgagactggtattgggtagcgttagcacaatataaacagaagagaagaaagatgaaagcattcgacaatgaaaacactcacataaaaccattagaatgaatctcagcccgagtcataatacgctcgctgtcacgatactggcccttcttctcgctaagtccatgctggagaatagcagacataaaatccggacgggctatattcgactccaagcgccggtcgaccttgcgcgcactcagatcaaagtgttcctggccgacgcgcttgacttcccgcggaatgaataaatccaggaagcccttgagcatggggaactggttggcagctccaataaaagcaatagccttcatggagctgaagatcaacttaatccacgggtgaagctggctgtccttcaggcagtcgaaggactcgccgaacatcaggtcaccggtgatatcaaaagtggtaaagttcatccaacttttgatatcaacgatggacgccccttgccgaatctgtgaccgcagtttggtgatcaaggtatcgacatagcctgtgataagaccttcttgatctctcaatgccttctcagagaaggcgtgggctagcagccgtttctgtcttgcgtgggtcgcattatccaccgcacagaccaaatgatcgaccccattcgccggggctacatattggctccgattcttagggaaacaaccgccaggtctggcaccgtagatatcgcgaaaggcctgtgctgtgttgaaggccaattcattgggtccaatgcgcagaattggaccgtactgcttgtgcagcgccagaatatctaggtgattacggccacggagaatggagacatttgatgggatgcgagatatcgcccatagctttggaccggggaagtggcgcaggggcgaccagcaaaaagtgtagatgatgctgtaggtgacccagagcaggagctgttcggtgctgattagcgttggtttctctgaaaacgcctgtagagggcattgctcaaagctgttgtgtttccccggggagatgtagggattcttttcttgcatgaaacaaacgagggttgggagtacgagttgatgcaacttaccaggcatcctgcagccgcgccccaaaagccagggcctgaggttgcccaagacataagatttgaggtgaaagaggtgatagagatccacagggtcatgcactgccctgaaaccatattcagttcagggtcatctggtttgttttctggatagaagtgggatttggtaaatgtttctcctttttttcatgatttcaaatagtcattgggcactgaaccaaggccaaagaaaaagagaaacgaacaaagaaaggcagagttgcaccagtcgaatgcggttagtgcaagatgcaaaggtgaaagatcacatcgggagttggtgaaagaacccggattcccagccatatcaaacctatctacactcttgtttggactccgaaaatcatcgggaaccctagtcaaattgcagattcgactgggaccaacacggcttccgaccgtaaacgacatgcaatttgcagtacgtatgcaccgcgggattcttgagatctttgcgcacccccgctaggaaaacctgggtatcattattcgaccatcccagtacacgagtgaaaagagccaacgagtaggattccaccgccatgagaagggagcattggttgtaccgaccaatctccttttgcacagggtccctagcccaaacactcgatggaacctagaaaaaaagacagtcagtcgcgataaaacaggcaaacaaaaatcaaaagccaatcagacaaacgagcgggggatggtcgcaccttgtacacctcatctcgaacatcttcaaaaccagcctcaaccagccgctgtcggtgaccttcggcgatattcataggtcggtgaaatgcctcgctggcctgagttagtcgttcaagaaactcacacaacgccggcgcaagacggatcgaatcatcgtccgacttgagcatgacttcaaactcctgcaactcaacccatccaccaggacgcagatgctcgtagctctggcgcatcaaccgtggccagtcggcaatagcaccgcctaaatcccgggcatggatgaagtcaaatggccgacttgggctgtacagccattgcgactcggcatcgtccaccacaaatcggaggtttggtgggacccatgatggctggatgggacttagatcggtgcctgttatctcggcactggggaagctgtctgcgaagtcgatggcccagattccggtgccggtgccaatatccagagcgcgttgaatattactatccagtggtgctcggaagagccggccatttagtacgaggttccgtacgtggtgaaggagatcttgtcgatcttgttctggttcgtcatttggaaggacgtagtggccttcgcggtatgagtgataccgtcttccattctcataagcgtagtttttcacatcggatagcagtgaggctgtatagctggatgtgttgtctgattctccatcaaagactgagtctgaatccccatttgttgatgctgcagatgatgtgtctccattgtcatcattatcgtctggcgataaggagtttacgggtagagatggcgcggaaccactgtaatccacttcagaaatggacacggttgttgcgctcattggagccggcggcaaagaatgcggtgttggcagatcccacgttgagctcaactaatcaatttcagtggctgatgtagttaatccaggcaagggagtcaggtactcctcgtcactgtcctcggaactttcctccggaattcgtgccagtccaggagacgggagaatcccttcttcgcgatgattgatatcggcctcaagcgcagagtcgtccaacaatggcagctcaggtatatccggcaagccagatgcacgaattaccggcgctcgaattgaaggagcaggcgacaatcgcctgactgaagcttcctccattgcagactccatttgatcaaaagtccgttttaacgggatgcaagggacaggtagtagcccagcctccggagctggaattcctgatatcattttagtggaattcggcacggcgtcagacgacacgattagcgaggaatcacgattccctgtcaaggctaggtacgtgtgagaggacaatagatcggtacccagatcaattctcgtgttgcgtcgccggtcgtccaagcacatggggtaaatacaaaggaaatcaatcatgtcaagaggaggtagccctgggccaatctatacagtaaagatatctgaccacagtaagcaatggaatacttagaagatcattggggagaagggatcagataaatagcaagtttattttagcaaagagcttcacttttcatgagattgtctcctttcccatggtatcacaaggaatatcaaaagggaaagtgccggagtatatggccaattctaatatcggcaggggtttacatagtacgacaatcacactacggcaatcgggcttattacctgcagaaaactatggccaaggtgtagatcctgaagaaacccgggattttgtattgatataactagactcatctcgccccagtctcgagtacaacggtttgttcaccactgttcgtgcatgagtttattcggtgggatcctgatgccccaacacagagaagaagcacatattcaggaatttcgtattttgatatacaaaaatcatgacatagaagacgtatgccaacattcaataccagttcacgcgtgctgattcagctttggggaccgggcatgtaacagtcctggctcgaattcttggaaattgataagattcaatgtggtatacattcaatcaataaccaagctaggccgcgatgcgtgtgggatattgatggcatttttgaggggtggattcatgcacagagtttcgagatggtacccacgtcccacacatcgccggtcaacctctatcgtttcagcaggattgaagctcatgtttccgggtcccatcgatgaaagcatcgcatggcgataaggacaacagttgtcaacatgagtgacagtttataagacaatgccatggctttagatgagcgactcgcttggaaggtgcagccgaatgcctgcttcatctggggttggcaatctcattggacaacttcgcttgttgatgatgagtatatatatatatggcatctcgatggcacgaatgatggatgatggagagaaaaaggttgatatcatatgaaaaatgactatttgtaggccaaagagacaatcagagacaaagaacgagcccttctttattggaaggcgttagaaaaggcggcaatatatccatgcagcaggccgaacgaaccctagtcgatttttaaatatttctccgaatgtgtttgcctctgtggacattctatatattttaagatgcctttctagtataagtgccctgtctatttctcatcgaagcgtagcactgcccaggtcattgcgttgcacaggtcggcggaattgatatcctgtcgagggttggacaaggtgagaataagatctttcagctacggtgccccattgaaagagcgcgttgatgcgatgtttcatgttgtatatggggtttactattattggttgtgtaaaagtagacaaccacgtacgcggaggatacctcactgagtgttgaattgatttctgtaagccactgtaggatacagtatctgcattgcagttgcaattgcagctgcagtatcggggtattatctcattcatcatcattcatgcgcccggatcgcctggagtggagggccggtcctctctccatctattagtccctgggttttacggaaaccgtcctccatgtccttgttcagatgcatctgcttcgtcaggtttgacctctagtcctgctcgaataaaagcggcatgcagaatccgccaatgggcctcctggttgaattcgcgtaggctctccagagtgttacgctgcacctctgcccgtagatcgatctggttcgacaccaacaaccccttctcaaggtcgatgcgagcgttcagaatgccaccttgaatgaggccgattagttcttggacaaacggcgacgaaatatccgtcggacgcgcttcgccgccaacgaccgtaggggcaaagatcttcgccatggaatcgagtgtgacacgactgaaaggaatcatgtactgctcgatggatttggtgcgaatgcgtttgtacaattgagggatgtgacgctgaaggtgaatgtcgagtaagtagtcagggcgataagcttcgagaatgtcaaggcattggcggaacttgaagttgcagaagaaaacgatggcgcggcggatatgaggctcgagctcgaggaaggtgcggaaagtctggttgtcaagcacatttttctgcagatcgtcgcggttcatagaggcgagagcacatagaccaccgtagacggcgacatcgttgggggtgatgacttcattgtaggtgtcgcccaggtccggcgggatggacaggaaagagtttgctgcatcgaggtacaaggtttggtgcatctgtgacagagcagaggcggctgtgattttcgaaatgtttttggctgcgtcatctggctttgactgagagttgcgtagccggtgcacatttgactgtacagacatccagtcaccgcgttcagtagcgacgtttaccatcttgaagagcatagaagtaatgtggttcggagtagtgcagtagtctctcatgcgagagtaagctttggaggcagcagctagatcaccagtcttgtaatgatggttgcccaaatcctcatggcccatctgtagaggtaagtgtcacgcatcttccaaggatatttgtcattacttacgcggatgctttctttaatcaaattatttttgtatccccgtagctcatgttccagacgctcagtctgagtctgtacgtatcgattggtttcctggacccaggcggcgtcaagagaagcatcagggtcgctcggagctacctccgccagtgcgcggaccgccttctcatatctcgaaacgtctttgttgattttagcttcgtcgatggcacccttgagggcgtcgatcgagagcaatggggagcaaatgccgatgaggtaaagacggtcatagcgggtacgccctggtcgtgcattagaatcagaagtcgtttagagacaaaagtgtcactcaccagcgtagtttgcaatgtaagtatcaaggtcgaatttcgggggctctagcaaatcaagtaagtgtgtgttcccggcgtagcaacatcatcgcgcggagatagccccgcgtggggttaacataccttctaccttcactagtgcctttggtcggggtacagtgatagtcgtagcctccagagctgtggcatccatatctgcccgagacggaccagatgcgtctggaagcgtggtgtccatctttgccgagctgtttagacgatgcgttgcggggagaggtgacactggcaaatcgaagaaatggagcttgattagcaagctagggtttcagtggaataagatagcgaccaatttgaacgctaagaacaatatgctgttaagggaagtgaatgagaggtgggtgacagccagtcggtcgatcatctgtgatgggtgattgattgtctggcaaaacccgaccgcctacaacaccgccatacagaagggccgtgaagatgtacatcaatacggagtagagatagggcaaaaaagaaactgtcattctctcagagtatcctatattttggcctgatatatcttcttatatgacccaaatagagctaaaaggccaaaagacaagctagaaagctagaatgtcactcaaatcgtaacaatggggtagcttggttgcagcgatacgcgaccggaagactctgttgatcaccacgaagcatataatggaaatgctgaacactgaagactatatattaatccccgggcttatatgaagacgtctgaggcactagaaatcctcgaaagccgtagagtggagctgcactatgaacctcggaacgtgagtaatcacgaaattaaacatcaagtaacctatcggctatataaaagcggctcgggaccccaatatcttgattataatccttcttgccgacagcataaacagatatataatcgacaaagctcggcattcagtaatcacaaacaaagtatataacaagcctaatccaagacgtcaatcgaccccgactcaacttctagcaacagaacgaaactcctaaagcctcaaaatgtcccaaacacagcaagtcaccctgataataggagcatcacgcgggatcggacgccaaattgccatcgacctagcaaagaacggctacgccggtacagccacatgcaatcccacatagaccatcgagactaaccccaaaccccagtaatgctatccgcaaaaacaacatcggacgcatcgacagtgactccgttcccaccagacccgaactcatcgcagtctaccatcaacacagtagagcgcgagattcacgaagcgggcggacacgcggcaacagtcgccgttgacgtgcgtgacgccgcacagatccagcatgctgtcgacgagacggtgcgcgtctttgggaagctcgatgtactcgtgtacaactccggcgcgatctggtggtcttctgtggagaagacgcctctgaagcggtttaagcttatgcagcaggtcaaccccgagggactgtatgcgagtgttcaagctgctttgcctttctttgagaaggggggctggaaggggcgcattattgttgtatcgccgcctatttactcgaggttctttagggggaagactgcttatgcgatgggtgagttacccttgatacgtggggtagaggatccacatagagtgtgtgctgatgatgtgttgtatgtaggcaaagtcgcaatgagtgtcttggtcaaaggactggccatggactttgtacgccaaggccgaaatgaaatggcggtgacgagtatctggcctgcatcggtatgtgtcttggtcttgattccatccggacgtggagtgcatgaggggattgctgactgcatcattacttcctagtcgattgaatcagcagctacagagtataataagggatccgacacatcctacaaaaaggatttgagaaaaccggtatgtccatttcgatactgtctactcttcctggtcaattcaatactgacacgatgcaatagacgatattctcagatgctgttctggctatgcttcgtgccccacatcaaacagtgaatgggctcctggatacagatgaggactttctcagggagaaatgcggagtctctgacttttccaaatactctgtaatcccaggatcgacgccacggcggatcatgccggccaagttcccagtcttggagattgcagagcaagacgatgaagggcagcgaatggatagcacgaagttacgggccaagatataggtttgtggaggggtgaattgaacctctcattcagactagacgtgcatttgatacagtatctgaaaactggagatgtaaataacccatgtatacattaatagggttaaataatattatatcgcaagatacataccaatgtaggaaatgttaaaacagggtgtaatgagcgaacggccagcaatagagtactccataaacccagacaagaaagaaaagaaaaaagaaacagacgcccattgctaatgcagccagaaaatgcaagcccagaaagaaacaaaagactagccaatatcatggaagcctcgagcacgaataacggaaactccagggttcaatgcccttggcgagccaatcagacatagacccttgactctacaagagaacagcaaagccagcaacaaacccaccaaccagaacacaaagcccatagacatggctgatatcaacagagaccatgcgcggagcagcaccagtagcgctggtatctccattgccattgaccagggtattgacaggggtctcggacgcagtagcagtagcagtgttggcggtagtagtagtagtagtcacattgatacgcttgggattctgggctccacaagggttatctactctgcagttattctggcaagtggtgttaccgtcgcagttgagaacgcattggctgttggtttccgtgcagatgtagtaggggattgtcagggaatattcagtggcgttagggctgacgccgttgctgcatgtgcagtcgtaggctagtgtttcctgatgattggagttagttgggacttttctttccgttaagatgcttgctaagcgaagggcttacggcggagcagttatttgttgttggtgaacccgaggctcctcgtagttgtagacagaggagtggacatgtggatgtctgggagttacaccaggcctctaagggaagggagacgtgttagtatgatgttcatatgtatagtggagagaatatatgatatcaacttacgtcttgtagcaagggtaaccgatgtcgggtcaaattggctgttgaccagagtgacagccgaagcgaggatgaacaggctcttgggcagcatggtgtcggttgagcttgagaactgaggagatcagaaattggcagcaggcagctacttgatgctcgtgttagactttttttcttcaagaatgccagtgatagtctgacacatgccctagagccgaaatagagccggcgatagctatctcgggcagatggaatgaagggggaaaggtgtaatgggtctaggaaatgtcatggaacctacagtatgaatttcttgaatctttcaagaacaagctgagaatgaggaggatgaagatgttgatgatctaaagccaatagcaagaggctgctccttgaagttgtaaagatttaggggtgcaagtagctcaaggaggaaaaaaaagtagccagcaagggaggagtggggaggtcataaatgaaaagagcaatcacaggactataacagcctatgtatagaattgtgctagctggtctgcatggtggcatgcactagtgcactctcgcggttctacggcatcgaatggtaattttttccttttttttttcagcaagcccaagatatttcctgtcaagtgagttcagtagtagacccgttgcttcggaagtgaggtgtggatttggacgaagggtccgctataggggtttacccttgcgatgtgtcgatccggggatatctccatgaagctcgggtagagacgtttgtccaggccgggtgggagctcactgtgtgtcacatctgtcatcctgtcgatagtctccactaaaaacacatcattgtaggttctcaaagataggaaagtgacatgtctcagttggagttgagaaactggaaagattagaggacgccgatcaagaaacgcttaccgcattgggattggcgtggtttgtggcttgaagtagtcggatgagattgtgaaagtgtcaagttgaagtcgaaaggcaggcaagtttgaaattgttgtcatatatgagattgatcttagagaaatacaatcaaaactgtcaattatcaacgtcatcaaagggaattgggtacaaagcatgaacatatccatatctgcccagccttagctaatccacccgaaccagcccccgtgaccgccaatgtctcaaatcgactccaattgaatttcgttatcgacacactcaacactctcactctctcgccaccatcgacggttccaaggttagtttgtctcacctctgatcgcttgtgccaccccgagtctggcccatccctgcatcaactccaatgtctaaaatagcccgattcataccaccttatacttgccaccccgcatgatggggggaagaccgccggtccatccccgaaccgagccacatgcacccaaacgcatcgaacctacccaacggcattgaacctcaacactcaacagaaaagctaacgaataccctcctaccgaacaggccaatacctacatattccttacagcatctaatggatggagccagcacccgaggaggccaatccggcatctaagccgccctccccacacccagacatccagcccgaccccgcactccgacctgagaccgagaccgataccgataatgccaatgatgatcctacaaaaaccgacagccacgatgatcaatcccagagctccccatcctccacctcccgccccctctccgccgtagtgcccccctactggcgccgacacgagcgcgatgcctcacatgtctcgcaggcgtcgctgcgtggcgctaccatcacattagaagaccatactaccgacccgaactcggagacgagtcgggggctctgggcgagtagcgttactattgacgatcatgttgtggtgcgcggtatgactggggtggggtcgtatgttgtgtggaattgtacaattcagacactggatgtgagtttgggatcagataagggaacgtgattggcatggctttctaatcggttgtttctgtatagggtggtccaattgttgtccggatgaggtgtgttacttctccgtcccggtttgaaaggatgttcagctgacacttgggctctatagatactccgagttcgatgacctgcgccagcggctggtggcttctttcccgcatgcgaggagtgcattgcctgcattgccgccgaagagcattatctgtacgtcccttgctcctcttaagattgccattcaatcagctaataacccttatcataaagtcaaattccgaccctcattcctggaatcaagacgcgtgggcttggagtatttcctcaagtcagtatctcatcctatccacatgattcattgtgtagacctatttctcacaccgttccagctgcgtccttttaaacccagagttctcgggctcccctatcgtcaaagacttcctcttcggtcgtatatgttaataatcatctcgtcttcactgggtggtgctggataggttatatggctgggcgtttaggaattgcattttgcattttgcattgtacatctctatatttcgggctgatactaggaacctaagcccacaatactggatatgcgactgttacctttgcttacagaagggaacaacttacataaccatggcaaatactagatcagacgaagcggtctaatacatagaaagtagaaagggccatagaaatcgacaaggatttttcaagagaaccgaacaatgccgccgctaaggtacaaagatcccagcaagaaccctaggcgcaagcaattggaatagaacgccttgagtatgatgtagtgcccagcatcgctgaaatagcaacaaagaaaagaaagatatttaacgcacacagggcgaatagaatagaagaacctcctcctcaaaagtcttgcctttatgggcatgttgagcagaatcatccttcttaccatcacccttcaacttgtgactcgccacaaaagcctcgacatccgcccggaaaatcttgcgcacacttatattagccatatggatcatggcgagcccgtgtcggggaccgggtacgccgcgtgggaaagcaatataaagatccgagtcctgggtcgggtccgggcggaatttgtcatggtatgcctttttgccgctgatgggcagacggtggaacgcatggtcgtacaagccgcgtgtgatcttcttacaggcccacggcatgcccccgatatcctcggcggtgagtgtttggagcggttcgacgccgagaccgaggtatgagatgccggcgcgtcggaggagcgccattgacatgatgagaagaaggtcgctgattccattcacgcttcctggggctgcgatgcacggatcgacatggtagccgcccgaggcgagccgtcgaagagcggcgaaaccattgattgttccgtctggggtgcgggtgtagaggaatgtcatcagggcgggaacagcaaaggggtcgtatacggttatgaaggcttgcgggatagcagatgcgttgcgctcggcgcgccaggtgtcgtatatggtgattaggttgttttgtagttcctggtttatgccgtgcacggcgggggcgtacacgcctatggtgatgccgcctttgtttttgtttgtgagctgacgactcttggtcaagatgcgtttcccgctcttctcgagaatcacttcgtttgtctgggggttgagtacgcgctctgtggcgaagtggatggttgtccagccgtttggtttggcgtgatctttgagaaaggactcgctaacgcccatgaatgctatgctcaagtgatgtcgccgtctgtaggctgcaaattcggacaagacctctggtatttcgtctttgttgcataaaggatctccgccgatgattgccaccccgttctggaccttaaatgacaatgctgctgtccttgttttgttcacgaagaatcggtagctgtggtcgaggattcccatgtgtgccactctgccatgtattgcagctatttgttggatcgccgttgttgttttgaagtcgtcgagtgtgaaaacggtatcttgatctcggcattgcgctttcgcatgaaaggaatcagtatcgactttagttggttctgggcgagtagctgggatgcgttcattactatccacactcgtcgccggggtggaatcggatgtcgtatggcaacttgccgaactgcaagaggaagagaccgcgggacttgcgacgatattcttgcgcaagtgatccataagggaaattgacgagataccactgtcatcactgctgggtttggatgtctcaaagagctggtcaattaaggagtctcccatctcatccacgaacaaggtcttcggttttcctgcgacggggttcggagtgtttccctttcgtgcgcggcgtgatcgcatcttcttggttgtgggtacctcatgcgatgccgcagcttccgacatggtgagtgggacgcggaggcgctcggagggaataaaagagcaaaatatatgagaagtcagaaaagaaaacagcaagaaaaaatcaacatgaagtcggagaattgtcgggaaggcaaaaatggcgagtatgaaagtgctcttgcccgaagctacgtcggtatattaggcagaggcattttcataggcagttcccttcgtgcccatccagtgttaccgcactgcgtacccaggggtatagatcggtctcaccaatcagtagacggcaacggggctagatcgaccgctaccagccttatgagctcttggctcgtcctatgacgttgggaacagcagaataaagtgtgaagcgaactatatatagtctgggttctacagatctcttggctattacaacatgaccatgacgaaccttggaatagaggtacttatctctcacctctcatatacctttgtctaatttgtgttggagttcaattgtgccatgagaaccagccatctgtcagtatcagcatctaacctaagtatggttagcgatcaaatatacaaactggaagctagctaggtgtgcttaggttccaaagctgaattatggagaatatgcaatgaaaaaccacatgaacaaacgcaaaagactggatatcgtcaagttcaaatgggggtacatgaaggcgcaatgcaacgcaacgcaacgtatgtcttgatcgaaaggaaacaagcattcaatgtccaagcagaaaagatcatctcagcatgacaaaactggccagcgaaagactgaagggggaaaagagacgactactcatccgcagtaccgtgtccatccatgtgtccattcactgcactgcatccattggcaatgtcatcaccatcactctcttgttcaatactggaatcactgaattcaaaaagcccactgatctcagtggaagaatcatcactgtcacaccccctagccatccgtctcagacacgccaaaagttccttctgctgcttcaagatgttatcggccaaacggacgatcctgtcagtctgctcaatgcaataccgcatttcttcggtctgacgctcggtgcgaacacctagcatcgaatcctaaatctctttattaggataacagtatccagaggaccagttcggtacgttcggtactgacaatgtggtcgatccagacttgccctaggatggggtctggagtctccggcaggtaaggcgagtggagattcacagtacgggacacaatgcagtcgcgatggtggtaggcagaggagctgcttccttgtccattgcctgatgcggaggcagaggcatggggacgggccggttggatgatctcacgggtgggtctgccagactccatagtagggctgttaaattgaatttcaaaatcttgaattgaaattatatttttaattttcatgaaatttaaaatataatttcaattgtttcacgctaaggcgctagtaatatattggtaatgttttgtaatataagcagaaaaaaaaggcagaaaaactagcagtaaatttttagttactagtaaattggatgcacaaatttaaggtccctactataagtactcaaaatttcaaagggttaaaatacagttaagaggtagttatggtgcgtacaaaatatggccgaattaggttagtgtcattcttcccgtagccctaaacctcaaagatataccttaactttaaccacgaatttcagacgctacactagctggatacgaaagataagatatggtctagaatgcttaagaaaagggctttctagtgatactaaaataataataaataatcattattttatatgtacttaggctctatgatttcctatatagaatataatttcaattgtttcacgccaaggcgctagtaatatattggtaatgttttgtaatataagcagaaaaaaaaggtagaaaaactagtagtaaatttttagttacacaagtcataaggacgctttacacttattataatacacctacccctatcagtagactcagagtcagaaagctcatttcctagactaaggctttcagtctaaggcttaagagaagtcatatcctagaagaagcgatttctgataatctgctccttatcaaaccggtctatctaatcctacgccttttctaggtcaggctattggataggccctttacttataagtcgatagtttatctagagatagattagcttattaaccttcttaggtaaaagagaatgcgattatatacctagtgatttcgaggcaatagcgtcgactgcgtttcgcgcttaagcctggctgtagaggtgaccataccttagtaggctggttctataactgacttaaaggtattgctagctgtaatacccgctttaggtaacgatagggaaggaaattctaccgcgtatactaccctatagattattcagaggctggtccttacgcgtagtaatacagtccctttataaacccgccaaactattaagatagtaagagtaacgaccagagtaataataataataatagtccctatagtcctaccggtagtaccgatggtagtaagggaagtggtactggcggtagtagggctggcgatagtggtattggcgatggtggtactagcgatagtggtactggcgatagtggtacttagagcgactctttgactgtaagtcttctatagatatagggtaggataattagatgtcgtcggtatatagttcggccttgtataagagtgcctgaagtaggacggggtggccggatataggggctacagggagcattttcttacctagattaccagagatatatttttgacctatacattgcactctacgtggtctagcggactagcgctacataagcgtaggcggtctaagaagaatactaggcggtgtaggtaagagcctgtattcggagtgcctgaagcaggacggggtggccggatataggggctatagggagcattttcttacctagattaccagagatatatttttgacctatacattgcactctacgtggtctagcggactagcgctatataagcgtaggcggtctaagaagaatactaggcggtgtaggtaagagcctgtattcggcctaattaggcttagagtaagctatgataatcttattggctctctgaaaaattaaggtatctaattggtggactactaagagtgggtccatgcctgaggcatagaccgattttgaaatgaaataatattttagcgttgaaattgaaattgaaatgatatttttaaatttcaagtgattttaacagccctactccatagtgggccgctcggtggaggcggtaacgggatcggcggcagccgcggcggcagcgagggtctccagagcagtgaagcgagagcgtctaggctcaattcctttgtagctcttccgattactgccgtcaggcccaacagtagcaagcttaacagtcataatatgaacggctgaagcaaatcacgggttgaaaaatgagcgatgaataagaatgggcaaaagagcgaaacccagtgaccggatcagatgagacaagcgttgtgggatgaggaagactgaagggacatgtttcgatggcactaccctttccccggtgttgacaagagtaaatgagtccccatcgctgtcgcaagacaatgttctccctctttcattttctatactcctgattggtgggtcaccatgtgcactagtccaagaacagctagcgcatatatccacacgctactcccatttaggaaattgacatcccgcgatctcgacaacatgtctgaccactcacgcttgtccagtcccttctgtcgaacattcccccctgactgtctatatctctgtacttctacaataaaacacaatgatcacaaatcgcccggctaccccagctgatatcccccaagtgcgggatatcaatcactggtacatcgttaacagctgttccacttttgcaactaccccaccgccgatatcccattatgaggacatccttcgggacctgtccagaagaaacctccccttttatgtcgtcgtgtctgacacgcggaagggaccagacggcgcagatttagtccttggctacgcttacttgtctccattccgtggccatttgctgtcctatgcaccgaccgtggagctgtcgatcttcatgcgctatgaccagcggcaatttggctatgggactattattcttagaaagcttctgcgcttagtgcagcagggggaaattgagcaccgctgcgaggagagagtgggcgatctgccgcggattgggtttggtacctccatggctgtcatgaagacttcccttgtgcagaatatcattgcaatcatagcttatgacacggaggctccgtttgacggggaggtattgcggagatggtacatgaaatgggggtttgtcgagagggggcaattggagaacgttgggcgaaagatgggtcattggtgagttgcttttatctgcttggactgatggattttccagctgatgactttgactaggattgatactctctatcttcaatggtcaatgccagaaacagatagttattgatttggaatcagcgaagtatccgagtcaatggataagcaaaacaggttggacagagatgggagtgtatattcatagtcaaggcctagatagtcaatctgctcagatattataattagatggtctatgattggcgtagtttctccatatcaccgcaaggcaaatataaagatagggactacgaccgattctctactcgatgatggctcagcatgcaaagcttggggaagatagatgtgatgtatttctagctagcttggagccaccttgtagacagtgatatcaatgggatctgacttcggccaaagacaggaagccactcgcatacccactcttctccaggcaacaggctggtacctactgacaccccgagagcaactgtcgagataattattgaggtatctggcatggtgaaaaaaagaattcgaactcgatcacccactctggatgcccgaatatcttatccagcgttgccatattctgagccagatttggagcatccgcttgaacctgctagttggtgactctttgacttcgggacgtcgtaaccttcatccgtgtccgacctcctttcgaattctctatccaactccaggatttcatatggcttgtatcgggaagatgtaggtattcttgttgtataatgggaaggaacgtgtaggtgtaggttccccggcgcgcgcggcagcgtgagcgttgtccgcatccgcttccctgtgccggctacatcaaaaaagcaaaggtcagcatgttgttcctgatattctacacaacgatcaagtgacatacctctcggtgcagcttacagtggtcagccttctgcaagctggagctaatctgcaagttaaagtaagaagtcaataaaagcaaagtgagaagagagtgaatgcaaggtgataggacagtaaatacccaaagattgaagaggaaagaatgaaccctctgcaaggaggattggttgtccctgttcaaagtatgcaggatacctccaacgattctgtcaaactggcggtacatcatacgttcaggttcatcaggagattcaccaatctggaagttgatgtaatgggccaagtctggcatctcgcccttgagctcgtgaagtatcaacagggtaggaagccaacagtagctgacttccttgcagatactagcctgagcgcggcaagtggaaacaaaggcatggaacgaacgaaactggtaccatcgcatcgtccacagcttcatgaatgccctagactcggtgtcctctgcatcgggcaacaagttgatgatcgcaaggtaggcctcgtcagctagtcaaaggtggttattgctagattttatgagggcgacgaactcctcttccagactaagtatcagccatttgctcaaattctgcgaccatttcagccagttttcatatttgatgtggtcgagggtgggtcgtggaatatgctgatgtttgctgatgatatcaatgaggttgaggtctaaggacgagctggatactggttttccaggatttgagatccgatatctcggacaatttcttgacatttgtgttagtaatttcgtcaaatggtggcaggtcatcgattcctgggctcggattgagccaagatattccatggcgttggtaaccggagttgaggacataatagagagatatcataggacctgaaatgatggttgatacgggtgaaataaaatatacgcataataaaaagattgtttgagtgggaaattctgttgtgagaaacgtgaacgtgatgctttaaatcccacctcaggacgcactcgattactacatccaaacttcattattcatatttgccatcagcaatcactactgtctcgctggttccttcttccctggcccgttgtacagtcgcagaatacctctttccagcaatgagccaccaagcaagctcaatactcaagaatccgccgacaacaacacaggtatagttcatgtttgatactgcgtggctgttagcacatagcttgggcaggatacaaaggaatcatagaaaaccacagcacatacctgttacaggcatctgatacggaaatgagaaaaagacaatggcaaacaccagccacgccaaagagacgatgttcacggtcattcctagtgtctggcccatggagaatgggccacggcgcatggttcggcggaataagagaacattcgtcagaatgggtacaaggtaggcaaagttgttgatcgtcctgtatccatgtcagtgtcaagtcgttgctaactgctttgtagtatgaaaaacctacaccgcagagctcatcattgcattgaatgccgtgctcgaccccaagtatatacagccgaggagggcgataatcacggtaacacagagctgcgcattgaacggcgaacctagcttgggattgacacgggcccataccttcgacaaaggcaggccctcgtcacgggaaaaggcccagaagactcgtccggtacctatagaagtcagagggttgatcttcgatagcgaaagtactacttactcaattgtgaaccgatcacgcagggcccaagagcaatccataccatgaacaccagcccgaatgctccacctcttgtagaggttgcctgccagaagagctcggcaagaggaagtccagtatgtgtgttagccaagctgccataatcttgaactgagaacattagactgagcagatatgatagtccggtcacgaatgcgattgatagcgtgatagctgttgatgcatacagttagccaaattatcgaagaaagcaacacgaccactactaacctagacccaaaggggcattctttccgggctataaatgctggttagtacaatacatcagatttgtatctccgagccatctcaacttacattgggcatttcttctgtgatgtgctgtggtatggtcagctgcattcaaccgggcaccttaacaatgtgtacaactcaccgaaatgccatctagtcctccaagtgagtacattggattgaccaatccggtgataaagcagataacattgttgtcccagccggtgttgttgatccaggtgcgaaacacgaacttgctgtcattatgaactggggctttggcggccacgacaaccatggtaataaaccaggctaattgcaggtagaccactgaaactcattaattggtgaaccacacaggaaaagaacccacatacatgaaaatttgttgattgccggaataaatcgattcccaaacatcaccacacccgaagtcacgatattgaggatctgataagcgacaaaggtcatccacggttggaccaccaggtcatcatggtaaagagcaatcagcgccatggcggttgtggcataaatcaaattggttgatgcagacgtaaagatccctaggcttcatcagctcatgctaagacttttaatgctgggccacccacatccaaatacagtgcaccagccggtggcaaagctgagcaagctgttatatcgcttgggagcaatggcggcaatccaatgatacatccctccttcggtagggtatgctgatacaaattccgccagtgaagcaccgacaaaagattgaaggatgaaaacaaggatgaagccgtatatcactgcgcttggtcatttattgacttccatgcgatcggtacggaatgaaaactcacgggcgccaggaccacctgcgtcaatagcagtcatcaaacccaagccaaggcctattaccatgtgagtcggatgctgagcgattgcatgaaccaactaacctgtccatgaaatagtacaattcgccgcgagtccaatcaaactccaaagcgagaaatgtcgctccaactcctgcttatgccctgttcgccgtcaataccatatctcccaagcgccggattcgacacatacccatctgggccaaccgcagctcatcctcattctgcaccttgataaactcggtctctttcccatctccaatagacccgaccggcggagaggtagatataatttcagggccgctcataatggacataaaatcgaatatcgcccacggtaggaggtgagtatcacgaacagaaaaagagggggtacacatgaataataaataaaccctgcgcaacgactgacctaagtaccatcatgctactccgcgcgatgatctttagctcttatcacaacccggcaaacctgcagaaatcaccgggttcgccgacaagatagccggtcggcggcgacgtatcagcgggcgggattccgccaagccacatgcgtcccggcgatcgcggagcttcgccggtgcagaacgtggggaggactggaacccggaacccgctcgcgtgtctgcttcatgcacaggccgttgtaaccccatttgtgcttggcggagtataagcttgcgtcaaacttggtgtgctgtgcttatctcaatggaataattcggagaagattgcagtggatgtggaaggttgcgacggcgtaatcgacgatgagtcgtgtagcttacgagtgataacacacgatgaacgactgtaagttcatatggtcccacttggaggtcctgggtgatattgtattttgtatcaacggcattattcatcctgaccgacgacatccgaagatagtttcgcctactcatatgctattccgacaggtggaacttgatacctacgggtctaagtgcatatcgaggtagatatttgaatctacagcttctgttcgcacaagcagtaggtccttgacaattttcatatttaaattaacatcgctggtcaaattaccaggttttcacagtccgtccccttgtatacagtatcaagtatgtattttcattcgaaactcccaagttctcccgagaaaagttgcttcctaggaaacgatttggtttgccgaagttggacaagtctggcatctcttcctcgtgctcgtgaagcggccctctgaagaaacatggtcttgaagtcttccggagctcctgccggacggctggtttatcccaggctctttcttggtgagaaactggatatgcggaagatttccgatattaatgagatgacatgtttcatctagcagctccacaaattcttagttggattcttcgagtacttttgtaaatactcaagctttcgaagtatttcgtactggtcgatcaacagaacaccattctgaagaggggatgatgaatatgacggagtactctgtttgtttcgttaataggatccaggacagccgcatagaacgagatgtttggtcgtccgttggatgctgagtgtagttggtctggtccagtgcgaaccagtatagcctgccaaccagagagatactctgcgctgtctttatcatggcaggaaatctctgagtcctcgctctcatcattccatttccacgatcggatcggcttatgttgaagaaggaattagcgctccatattttgaagtacaaatcacacagcacatacatacatacaggatctgctgcgatatttcttgacctccacaaccaacagagaccatcaaagtggaagtgggaatcgcgctctcaatcctagcacttctcggaggatattgggatcacgtcacaggtctgccatatcttcctctctctcattctttttccctgtacacccagttagcatacagtccattatactgctcgttcttcttgtggtctcacatcgtatattgagagtatattgagatcaagattgtgataaatataatgaaacggaagtaagacacatctctaccatgatttgttaagtctccggatctctatcttccagcgctctgtgtcttttgagatatatattatatgacagattatttacagaagaagaaagtagccgacgaattttgtccatgacctggttaaatatagcaaacagcaaacagcaaacagcaatgggataatgtgtgacggattcagaacacaatggcatccccttagcatctttctcctgtcgcagtggatatcaccggagactgtcctattggcttaggagattatatttccccgtgggcatctcctaatttctcggagataaaaatccattcgcatgtactgattggcgacttctgcgacagacacaaaaatgaataatccttccaagcacgacaagaatagccaaaggataaactattgtgtgaaaattgaagctaactctccaactcaggggctattacatcattgagctctttagctttacgatcttgcgcacgaactcatcccgggagacctcaggatcgaccgatcgatccgatcgagcttgaaaattgattgtaaggttgtcgatcatttcccaactgctgggacattctggcactttgccctcatactattgggatctattcgctctcgtttcaccagaaccatggactgctggttcaaaagactgccgatcaccctcgtgggcgatcatggacgatatagtcataatcctacagatttttctttaaaagacctggaaggcctaagcacagatccgatctcgatttcgatcccttgaaatagtacagcatggaaccgccgtccatcccagataatcgtcctatcaagagacactccgacatgtcttctacgcctactattgttgagccggatagctttggcgcacatttcaaacccatgagctataattccccacgttcaggttctcggggacaaggttacgaaccgccagtgtttggccagccggctattggaagaccatctgttggaccgcaagagcgatcaactcctaacctcaatgccaatggtatctcgaatggcatctataatggcgaccagtttggtcgcaagctctccatcgatcaacaatcagtcgcagattcagtcaacacactagatttgggctaccacaacatcggccagcaaccacgaccacagcacgagatctcaggccaccaaccctttgaccagagatccctcagcactctctctctagaccaacagtccgtcggaacccaatcgctaggccaccattctataggtcggccaccaggcggctatgctccgtaaggccgaacagtcccaattgccagaattccgctaattacgcagatcatctacttcgcccgcccgcctccactcgtctgcatccaacaggtcgctacaaccgaacttgccgaccaacgaactcccagttcttcagcagataaatccaaacgagggctctgaggaattcgaccctatcgctgaagaaaatgaggaaacatcttttgatctggtcgccccatacgagggcgatgcggcccccatgcatactctagaacgacaagcggacctcatgttttgctcggaccatatgctagcgattctaagcactccgcgctacctcgcacgcttccgcgagttccttgcccaggagcgtccagggtcattttcaactctgaattactacctaaatgcttccaaggctctcaaagcaatcgagtatgctaattcgctcgtacgttcggttgttgatgtgcctacatccggtattaaaactgcagagcacctcgttggctcgactgtaaatgtggcgcttgaaaggcgcgtgcaggcagcgctggatgccttgactgccgaggaattacctgctttcattacctctacatgtatcaacattaccggcaaggtagttgaggagcatgtgcgcggaaccttgcctgagaaattccggggaacggcagatgcgctgggtgaggtattctgtctgaccgatccatcgcggccagataaccctattatctttgcttctgagggtatgtcggattactttacattgtctacacagaatagctaacgcactatgcagaattccaccgcactacacaatacggcatggactacgtcctaggaagaaactgtcgattcttgcaaggaccgaaaacgaatcccaacagtgttcggcgaattggagaagcgctcagggctgggcgacaccactctgagcttttcctgaattagtatgtgccccaacacatcctaccctgcaaaactaattcgaaaacagccgccgcgatggctcaccattcatgaacctcctccaaatggctccgctatgtgacagccgcggtaaaatccgctacttcatcggcgcacaggtcgacgtctccggactcgccatggaaggagcccaaatggaatccctccaaaacatgcgagcgcaaaaagaaacccccggggcagatggccaaataaccaaagaatcaaatagccagttccaagaactcggcgaactcttcagtccgcgcgagctgcggaacgtgcgcgagcatggcggaaccctcttccaaccggtcgtcaacgaagatcccaaccaccgtctattcctccaagactccgacaccgagaacgaggtcgaaacccaatcccaaggtccaccgagacccacatccgggccgacgcccagccggtccttggccggtgtctacaaaaacgtatgtcatccatccctccatactcggatatggtatcgaggactaacagaagtaaaccagtacctcctcgtccgcccatacccatccctccacatcctcttcacctccccctctcttcaaatcccaggcatgctccaatcctcattcctaaatcgcatcggcgagacaggcgcgaaacgcgataatatcatcaacgctatgatggctgggcgaggcgtcacagcacgtatcaagtgggtgaccaaattcaacaacgaccaggctcgtcatcgctggatccattgtactcctttgctggcgagtaacggccaggtcggtgtctggatggtgattgttattgatgaagaggaagaggcagtcagatggaagggtaattggccgactactaattaaatagtcttgctatgtatatgtaaattattgtgatcactaaactatctcgtgtgtgttgtaatacgttagacttcatgtgtaccggataatgcctggcgctcgagacttttcccctttcattttagtgctcacctcttgccgctttttgctctcagagtaaaattgagcataggctgagcgtaagtatgagctacatcaataagatgcagcacgctagtcacatcacgtgcggctattatctagctcaccctccatacattacgacagcatcctcagcgataatgctggtgttgggtcctaggatactcacgaaaagattacttcttatctgactggcgctattatgcgcaagttggacggtaatactcttgtttcgcttttcttcggtgatatggaagtgcgtttgttgccgcacctatgggaaagcaccagatacatcgatggagaaccccgatttttgcgtaaatactgagccccttagcacgcaaggcctccctcctctcctcgaatgacgaccgggtgactgattttattcaccagccatggtttctgaccagaagatagacgcagggttagctgtggggagtgagatcctgccaacaatcgttgaaagtaaagaaaacgcaatatccagtctaacatggaaagctcgcttttaggacaacatcatcacagtaagcttccagttatggactgatcttttccctactctttggctcctgaaatttatactgtacggaaaatctacgtcagccagcattattaaatacctacgaaggtcagcagtctttgctttatgacatattcccagtttttcttgcttcttctcgcagaaacctgccggaccttgtcaatctcgtaaatttatatacccgaatccacgtttcatagaatccatcgcacctgctgcggcgccaccgtgatttcacgagagcatggacgatttatttctagccaaacatcccagcgccaatcagattctagtccaaacagctacggggtctttttacgttcttagtgctcaaagcttactatcggagatgctaccgcgcgcatactacgtctacgatgcaaccacagaccacaaccgccactcaaaaacaaaaggagcacacatttacactaataaaaaccctttaggcagcctgccactgaccaaaagactgtcctctcagtttctttcagagaagggagaaccggaattatcttctcggtatcgtccgcgctaggatttggttttacgccctaggggtttcctgtggaacagggtggccctttcgaaattctctttgggcacgtcctgtacaactacctagctggcgagcgatagctttaatcgaggatctattactatacagaattgatggtacgcggattccttgagattaacgttcctttggctagctatgtttggtagtcctcatttcactaggtacatcaaagctgtctcttcataaattacaatatcagaatagtgcacttggaaaagtgcctccgtggctttcatgttcaaacctggaccatgtttgcatattcatattcaagtggcgcgtggttatttccaatttggttgttcagtttcccactcattaagcaatcgcgatacttccttcaacgagacaggtttcgtaagaaataggtccactcctgagtctagcgccttgatctccgcatgggagctactaaggccagtaaaagcaattatttttgcccgaacgcacccatcccgtgctttttccatcgtgcgaatgatgcgcgttgcttcatttccgtccatgatgggcatggaaatatccatgaaaatgaggtcataccccttcgacatcctctcgacgcactctactgcttctctgccgttttgtgctatctccaaaagcgggacctttcgtttgttcataaaagtcgtcatcaggcggagattgatatcgttatcatctaccagcaagacccgaggtccgctctggctctcatttggcgtaccagtaggatttaggctggaagaattcgatagagtagacgacgtggtacgaccggatatttctgtccctgaaagtagcacgggattatcacgcctgacggagccaacatgtgagtgtaggtttggtgtgaaatccaatgactcagcagctggtttctctggatgaccaagtgacgaatgtgtggaagtctcggccattggaggcgggcgtgcaagcttgagtcgttccggaaaggcagattctgatccggcagtaggtagatgcgatctaggagacgccggtgtcgaattaagacagcccaagatacctcttgcgagtctttgtggaccgcaaggtcgacgtagaacgctaaaagccccagcaaggtgtgaccactttttcctagggtcactggagttgtcccattcattgcaaaagacgagcaaatttggtgatccagtaagtgattgccgtaccttttcgtcggacaagtaggtctcgttaacaaatacaaaatcaatatattcattggcagaccaaggcacgaccttgatgccataccaatccatcaaatactgagcgatcgaagaccagaactgatttccgataagggaggagtccattccccaaaaggcagcacaactcttcgttaaccccatacaagaaagttgtgtggacgggataggcgactttcctgcgcaatccacatcaattgatgatgaatattcttcctcggttagacgctcaagaggaatcgagacttggaccacagtgccttcgcctactcggctttgaaagtcgatacttccgtcaagtatatccacaatgccgcgaacaattgacagaccaaggccggtacccactgacagcgtatcctcctgcgaaaatggagtatataaacgagtccgtaggtattcgctcgaaatgcctttccctgtgtcggatatagtcaaggttaccatatcctcgggattctgacgccgcgaacgacctttcggacactgagtggcctccacgcaaattgaaaccaggcccttctcggtatacttgagagcattaccgagaaggttcatgatgaggcgccgcagcgatcctggctgaactttatatacccagtcgttgttggtaatattaatgacaatctcgatatctggactggaggtgacttcctcgtcctctcttaccagttgggtaggcaaactccgtgaaataagtttggaatgattggctagcgatgcagactgtttcatatgggaatgtcccaagcacacactatcaacaacgtcctctgtcaatgtggcaatattagtcgccacgaattgatccatgcgcgctgggttttgctcggtaaactttagctttgagaaatcctttcggcgcctggaccttctcttccgcctttccaatgacatgattttgctaaagtctagcacttggttcatcgtatccaatagtgttcgcccacatgcattgatagtctcgataagagattcctggaaatcatccagctgagtgtctcccaggaattcggttgcagccaagacaccatgcagggggctgcgaagctcgtgtctaagaaacagagtcagtaccagctgcattttagagagcaaatgatgactcacgagatgctacttatgaagtcccccttctggcggtctgcgatgaccgattcaacacggctgtattcggtcattatggacgatgcgaagccaaatattgaggtcaaatcaacagcccgactgaaaactcttgtcggttgaggtgtccaacagaagcatccagcaaaccactcagaattggtggcatcccataagggaacaaacatgacttggcacgcatcaggaaaatacgaattgagtttaaaggtttctgaggccttgtgcttgatccgttgtttctgagttgcggtagtggaatgctcttcgtccgaggtggataaagacccatctctgtgaaatgaccagagtcttcccttgggatagcgacgagttaatcgatatagaaaatctttgtccatattggcagccgcgcatggcgacaaagagttatcctgagacgaaaatggatcaatcctggtggaaatggaaagaacagacgcagaagttttcggattgacagaagtagagtcaccgctagagaaacaatctggcgagacgtcgctgaccttgagaaagatcacgccgccagcaccgtgcaagtctagaccttgccttaaaagatttgcagctcgttgaaaaatccggtcattgctatccgaggatatcgatgaactgctgccgcctcgacgtgagcttctgaatgaagccgctgcgtttgcaaaaggctctacgtctgaattctcgttggaaactgcgcttgaagaccgagggtcaccaatttgagagtgcgcatcgctattttcagagctggcagatcggctcgtccgagagtgcgccgatccccgcgaggaagaactagagtttgagctctgggagcgagacatgtggtcattgtcggcgaaactggatttgccatcaacgaaagaacgcagactctgcgacagccgcgaggcgcggtgcccttcgacggcccgtcggctgacgtgtagatagtccatgaccatcgctgccactgttcctagtgcgtccttcccatcgtcagacaggccgtcacggggttgagtatccaacacaaacaagcatcctagattagtaccgctgtcggtgatcaagggtgttccagcatagaagcgagagtgtggctctcctttgacgaatggcaattgtctgaagcgctcctcctgtgtaagatcgttgacgaccagtacggggaaggttccatcatccgtttctgaggcaactgcgactgtttcctgttcagataaaagatcaaatccagaacaatgacgggtgcgtggcaaaatcacagattgattggccttacccaacatatgttccaagcgtttggcaaagtcgatgttccggcaaaaagcccatctccctccgccgtgtacaacttcgagtttccaatatttgtagtcttcgtagcttcggctatgatgaactgtgaatcgtgattcaatatacttgatggccaaaaatcagcccaaggtcaacgaaaatgtaggtagatccgtcttggagatttgaaagataatggaagaattacgtgataaaggcacgctgtgcgttgaggcgtatggctgcctgctgtgcgaacgaggtcaatgtcgtattcggactagacagggagctagattcggtttcaaattcggaggcagcagagcgaggaagccatgctgcgttaagcgcggcggggttggctggttggaaataccgatagacctcgcgagcttgacgatctgcttcgtgggcatggatagtctcttgtgttgggttttccatattgataataatgcgcagatttacaaaatttgtagaatatttctgggaagtcgggatctagtgatggtttcaaagatccaggcacatggccagagtcgtatgacgtagatgttcctgtatcacgccttggaagtggagaaggcaaaatttgttggtgacctatgacgtgcaagagagagaacatcagtcatcgagttcttgattcctgttcgaagattgaaaagggaagctctccaattgttggacctgagctctgactgcttgcagctctgtgtttaatgaggtattggcagcttccaggtcttcgttccttttctgttccgctgataacattgagttcaaccgggtactcatctttccattgtaatggaatttctccatttgagagatcgaattgtgctaaatcgtccacagtattgaccccaaagagagcactatgtgctaatgcgagggagagaagaaggtagcctgatgtaaattgcggtcggttgctatcccggatactaatcccgaatctagagtatcaattagtaaatgaaatgtcctaactagttagtatgcctaaaaaccatgctactaggctctttctacttatatagtatattagacatctattattcttaagctagacctgtttgacccgctatcctactgcctaaggggctttggttgaaggaaatagtactaagttaatatactgaaattgtaattagtagttaataatatcgctagagtaaagagattctactttatatcgaagacatcttttatatttatccttatgaggaggaatagaagatctaacgcttactctaataaagagatatagttaaagagtaaataagatgactattttaagtaacctagagataaacgtttaataatctatctactataaagacgatatcgttctttggaaattatatctcataaagtttagcttctctctcttttggttcactattataccttccgccgttagggtttttttaattcactatctccaaactagaatggctatcaggattagtcttagagggaggtaacgatagactcacccattttatttcttttcgatcatctaggatgattttagtctttataaattcttcaaatccaccaaagaaccgctcggcatacgcctatacagttcttaccgttggtcgtccgttctcgtttagtcggcctttagtagaaccaatgtaccagcggataaactccttaatcatctcgtgacttagggctggacagccaaacgaggtcttatagtatttaaatctattttctggcccaaagatcaacattttatcgatataagttattggtctcggtaagccttttgtctttctccctaattaaatcctcctatctgcgggctctagggtcataaccgtttctttcccgttaaagacgacgtctctcttttgcaatcttattatacttagcaaaacactattttctacccatgaataattgcgataccataagggggaagggtatttcgggtaaatgagaccggtattgatttagagtactgagaaaaaggcgccgagagcgtaggcgtatgaataatcaacatactaggctaggatatagtttgcttttatatttgagattcgaggtcaagccataatgagaactcagaaagaacccttgaccgcagcattatgaaatagaggcagccctccacttcctcctacgcataaaaataacgtatctccttgataagatgggtagggttcagaaaataagggctatctactaactaaacatcgcagtataaccgaccctatgggcctggtccattaaaggtatagtctgtggtggtctgggtgatcagagttgctcactgattggacacagagtgtcacagagtagtcagtgaggatccaatagttaagcatttacacagtatcagtcatcatgcacgtgactgctttgagctgatcactgactgagcttgtgctgatttgatgcttttaagttgtatccagctcctctaggaagtttaggagatgataattgcgagatcaagaataaaacttctactaaatagcttgcaagatgctacttgtcctaaatcttacaacctagtctgtatcttacatatcctggcactcgagacctttccctttcggcttcagtgctcaccaagtgctcaccccttcatcccgacgtgatcacgggccattatataactaatcacctgatctgctcactaagcatcattatttgctcagtgtagggatggatgcgaaattcaatttgcccctagaataacatgttggactctgctttgtacattgaaaattcttccagtggattagattgtgcccgttgccagcaagtacccgccgtcgacggcaatagtttgaccattgagatactgattcgagacagtaaacaacacagcagttgccatgtcttcatctttccctggccgtccggcagggattttgccttcaaacctctctttgggaattgtgctcttttgtttcttgtcactcccatgggccgtcatttcggtcggaaagaccccgggtgcgatactgtttacacgaattttgatttgcgaggaaacaatctcgtaggccaacatcttggtgagatgaattgcagccgccttactagcattgtatgcgaagtgacgctgggctgtttttaggagacctgaaatcgacgagatgttgacaactgtgctagaccatccatactcatcctctgatcccttgctcagcaagggtagaaaggcagtggtggtaaagaaaaggtgtgtgacattagtccgcatgacatcttcccactcctggatcgtgctctggtttttgaacagctcttcctgcaatgctttggggttgtcctgatctgtgttcagatgtggagagctaataccggcggcgttgatcaaaatgtgcagtttcgactccttcgcggatatctcgtcgactagcttctgaatcgactctttggaggtaatatcggcagtgattgggacaatctggccaggaatatccttcgagtataaatctgcaacacggtccaacttttcctctgtgcgaccggtgatgtagactttagcaccattcacggcgagagcttgagtggccatcaagccgatgcctgaacctccacccgtgacaagtgcgactacccactgttagcgacgccagcgctacggcaagcccgtttctataatggtaactcacctctgtttttcagcccgaaaaggtgttcgagcttaaagctccggttactttcttgagctgacatggtgtttgttcaaaagttcaatggtatacataatgcttgtcatacatcgctcgttatatgttctccaacttgctagtcttacgtcatcctaatgtcaggctttacgatgatgggtacttgatgtaaaacagggaaaatgacggtttggggtaatttattcactaagaagtcattatgatgagacattgaaagaatcactccgtataatgatcagaaataggtacagtttcttgccaacattcacttaacctgtctaaacccgtctgtatcttgatgcttaaatcaagatctagaccttctaagatccatcgagcatcagcaggttttcatcggagtgtccttgtattggtcggatacatttactacgcggaaatgatatgtttgaactacttgatcttagtgcatgacatgtgccaagccgcacaactcgctgggttaaaaacaggcatcgaagctttttttattgcactgaacgagtataaattcatgtatgcttcgtgaaaaacagaaatatagcatataataaattggttgaaagtgaaataatggcaccccatgagcaaaacgagcagagactcataattacctcaaatcgccttccactttccgtcaaatccaaagacgacacttacgaggcgattccctccagcgggggattggtgaccgctctaaatggtttgagctttcatgcctatctgtggctaggctggcccggggtcgatatcaatgaacgggacagagaaagcgtcgacaaagccctggccaaagaaaatgcctctgcagtatacctagatgagagcctcgctcagagtcattacaatggattctctagtacgtggcctatattctcgggtatattactacctcgctgactaggcgtatttagacggtgttttatggcccacgttacattatcagtcggatgcgtccttcgataacgagtcatgggacgcgtaccagcgtgtaaatacgatattcgctgatcgaatcagtgaggaggcggcggatggtgacctaatatgggttcacgactatcacctactcctgctgccacgtctactgcgtgagcgcctccatgcgcaaaacaaaagatgcgctataggattttctttgcacacccctttcccagcagatgatttttggagaggtcttcctgttcagaaagcgttgctcgatggtgtccttggtagcgacctcgtcggcttccatacggacgagtataagacgaacttcgctggcgcctgcagatctcacatgtaaggtccgggaaatagcattgaaataccaagtgactaaccaatttattagtggtgcagaaattgaaggcgacaatatctactacaacgaccacactattagcattgataaatatgtcgttgggattgactgccagagatttgctgatgcactcgatgatcctgaggttcaggctgaaattcagcagattgaaaaccaatataaggacaaaacgatcataatcggcgtggaccgcatggactacacgaaaggattgcccgaaaaattgcagggcttccgagtcttcctcgatcaataccccgaatggagtaaaaaggttgtgctaatacagatcgccattcccagtcgcgaagatgtcaagaaataccaggatttggagggggaagtgagcaaattggtgggccaaatcactgggcaatatggtaagtgggtgcccacttctggtatagggtatggcaggtctgtagatttcaagctaaataacaatcagctactcccacgtcgacaccattgatctatattcaccgctcagtttcttttgcggagcttacagctctatattcggtgtctgatgtctgtctcctcacttcccgccgggacggaatgaaccttgttgcttccgagtatgtcgcttgccaagaggctcgacacggtgtgttggtgctctctgagtttaccggtgcatcggcctttatgaaaggcggcagtctgttgttcaatccttctagtgcagatagcctctcaaatgcgctttacgaggctgttacaatggagaaggaggataggaagaagatgtacgaagagttgcggagttttgtcaccaccaataccaggttagttgtttcctttcatcttctcaaattccctcacctgccatcagaggtccctcaggtcttgtaatcagcaaaactaacgcccttcagtgcgaactggacggagactttcgttggagatttgacgaaattgcagaatagatagcttttagagtagttttaactcttgacattggtcagaatcatttaattgcttcactggtatatccgactgccccaagagggctgtggtacgacgtaagcactatcaggttctaaaatcaaattaaatagtccacgatatcataggctagtggcctccgagatcttatgtaaagtactgtcaagaatgggatatggcccctctaggccctgagcaagaaccttggttattgttatgatctagtggtaaattacgctgccccaattcgtcaagtacagctttatttggtaaagcctgtctatgataggcgcttttagagtgaaatttatatttattttgatacagaatggccactgagatattgaaagtaagatagaatatccagattttgttttgattttgactgttcgatctgaggtttgtcgctcaaccggctggtcccgattacatgacgtcgtcactccaggttagtcgtggggctaggcattccacttggaatttaagatctcagtgacggcctttcactaagatactcatcgatacttttttctcaattctttagggtgcaacaacttccatgtctgatagcttggccctggtgctagttggggatgagggggttgggaaaacagcgcttgcagtgcgggttcgtcatgtatttcccctattttaatcgagataaactaatttcgagtatagttctgtttagagcaatacgccgagggctcagaaccaacgctggatgattcgtatcgcacgcgaatggtggttgatgaccggccttgtgtcctcgagattatcgacacagcgggacgagatgaacatgctgcgctccgtgaagaccacattcgcaatggggacgcatttattatcgcatacagtatcacctcgcgggaatccttctctcacgttcgagcgtactacgataacatcaaggaggtgaaaaaggtcttggcggaaaatactgtacagcagccgccttctgaacacccttgtcgcgtgcctatcatcctagtgggtatgaagaaagatttggaattccagcgtgaaatctcattcgaggaaggacggaaatttggagaatccctagactgttggttttatgaaacatcgtgtggcaagtaagcttggtggggaagatgatcctattatgaaccccttgttgggggtgctaactagctaactatgactaagctgtgacacatcggctaagactggctcagatgtagagaggacgttcaatgatgctattagatgctttcggcaacagaatcttcccagtcctcctccacagccagcatcgaagcaatcaaagaagggccaaaatgggaggaaaatctatgacccacgcaggtgtatcactttgtaaatatcatagccgtgcagtatgaagtcagttgttatgcagggtttcgatgaataattgctctctcgtaaaccgcataccaattaaaggcatcccatgcagagtagagcgagcagccgcgaattcgggcctcatacaccatttcggccagttggcattcagcgttaaggcatccccgtttgctccggtggtactgtttgaggcacgtcctcgcatcaaggtgcaccatcactgagggtgaggttgccgcaattgttcgaccggtaagtgctagtattagcagccgatatgagaaaatggagggtcatgcctctcgaaggaatttggtatctgcgcagtcgcgggagagccttcgcggcctaaagtgccgacaccatattactcacggattccggcagagtcaggatcggtcagaggggaaaccgagcgtagagcatagtttactaatgacgagggggccctgcagtggggacaaaggggcaccgacagccctgcctgcgaaagaggtgtgagagcagagtcgttgggagtagtacctgcgaccttcctacattatttacctaagcacacaaatatctacgggtggctatcccaatctctttcttacgtgaacttgatttataccgtgaagttcactcaaatatgaacattccacagtcaaatatgcacgaaagcaatgcgcctccgctcctggccaatcacagtccacctttaaccgccatacttgtgccgatcaggggactgcggggccaggcgactgacgcggctcaggatactctcccccatcacactcatcaaaccaaacgaccaagttgagagatggcactgctgagaaggttgtcgcctgcggagagggcgagcggcacggaccgcagcgacagtccactgctgaaggaaccacggagcccctcggggccacggctgctgaaccgcgacgaagttccctcgtggtatggccataatccatacatacgaacgagttataggccagtgacaccgtcaacgtctcggtgccttagcagcctgctgtaccttcacaatgagactgtgaatgtttactcccatctcatcccggctatcataacttcgctgggcaatgggcttctttacttttatttcacagcatcttttccggatgctaccggagtcgatcagcttgtttttcatatctatttgacaacttcggtcgtttgttttggtgtctcgtctgcataccatacttttctttgccattctgcccctttcagtgctttgtggggacgtttggattatgttgctattgtattccagattcttggttcttttgtctcggggatatatatcggattctactgtgaaccacatctgcaaaagctttattggtcaatggttcgttgatgatctcaccttgtcggtcatctgactgaatttctgatatacagattggcactcttggcttcttgactgggtttgtcgtggtgcatccccgacttcagagccaaaagtggagactgttgcgattatcaacattcgtcgcgacgggactttcggcatttgcgcctatcatccacgctgctagtatcttcccctatgatcagctagatcaacaggctggattgcgatattactaccttgaagggctagccatcgtgatcggggtcttgttttatgcggtgcgttaatttcccaaactgatgcagaattgatctgattggtggcagacacatttcccggagtcgtggaaacccggaagctttgacatttggggatcgtcgcaccagatattccacatcgccgtggtcattggtgcgacgattcatttgtatgggattttggttgctttccagtggaattatgaaaatcagcgatgccacattggttgaggagatgtattccagtagcttacctgtggactccatcctcccaggctgataagggctggcccatacccaccttcccggattggaagaagatcagctatacacacatgacaaagtacattatgtcgctaaccctaacaacaacgttgaaactctatacagaactagcttagcttggccggatgcacccgatacccccgccccttgtcatttccacttgccacgttttttctcttctagtcaaaacccaaaatggagggaaaaatcgcagtcgtgagttgtctcgtagttgctcggatcgtatctaacacggccaggattccgattactacactctgaccaaagattgggagcctgaggactttcagtcgtgagttgcggatatcattcccacggtgttttggcttttaaccatatgtatcagtgaaaccacatctatcgcctcgacaatcgcgaagggtcggttggaaaatggcagacggtgagtagcagcctgtggagatatgagctttgctaatagtatgagcagataccaggctatgaaggaagatgactattggtcggtcgcgacgcttcaatgtaggaaactcgaggctaatcatagcatacaggagtccttccgatgaccagcaattcgaggcttttgaaattgggtaaatactcatttttcgtctttcgttcggttcaaacagcttatcggttatacccagtcatatggtttttctcgtgctagaccatgaccgagagaaccccctccaccactctcccatcggcaaatctcctaaggtgagagagcgatctagattgatggcaaccttttactaagagtactctagcacattctggacattggcactggtaaaggaacatgatctatgtaatcaccccacctattctctccaatgaacctcgctaacattcacctagtgatatggcagatatgtatccatctggtacataccacttcctttcttttctcctttgcgccagactaacaaacgtcagcaaccgtccgtggcgtcgacatcttcccccctccggtgacatggatgccaccgaactgcgtactcgaagtagacgatgtcctccgcgaatggacctggagagtaccattcgactttatccacatgcgtctactgctaggagcattcacacccgagggatgggatcaagtgtacaaacagtgctacgagtgagtccctccatttacatttcccctgaacagtatctaactcctatccagcgctcttacccccggcggctggatcgaacaaatggaactagacgtgcgagtgtacagcgacgacggcaccctgaaagaaggcggcgttctagcctcatggggcgataacttcatcggctgctccgagcgggccggtcactccctcctaacgcaggagacaatgcggggcgcaatggagaaggccgggtttgtcgacgtgcaggaaaagttatacaagattcctttagggccgtggccgaaggataagattctcaaggaggttggacagctccaatatgcccactgggttgctgcactggagggctgggctatgtggctgctcactaagtttggtgcaccttcgccttggagtaaagaggaggttcaggtttatctgtccaaggttcgggctgagttgaggaatcctcgtactcatgcttatgaatatgcgtgagtctgatatgttaccccaggaggttatgttgctaattgtgtttagtcgtcgagtctggggtaggaagcctacggcggaagaactggccaacccagtcaagaccgagcctagttcctaaactagcattgaaccgattactgtgtttgcgtttaccgagttcgttttgcgaagcgagtttatattttgcatgtttaagtcctgaggcatgttcgcctcaggctacgacatgattttctacgtatagtaccagaatgtgattagcttgtctgttatcaatcaatttgttaggattcaaccctgggcgtttgctccacgatcaattgagcagccttctcaaactcggcttctacaatcaagttatctaacccagatcgttcgacctgcaatggaattagccaactctcaacaacgaacaggttactgaccagctccagtcccttttcggaattagttccctgcaaccgaaccacaaccggacatttgaaaccacccatctcagcagcggcggcaataatagcctcggcaatcatgtcacatcgcacgattcctgcccctgatcagctccatcccctattgttaacgtgtatactcaccaccatagatattaatcaaaatccccttcacccgttcatcattcttcaaaacctcaaaagccttcgccaaagcctccttcgtcgccgcaccgccaacatccaaaaagttcgcacacttccccccatacaaactaatcaaatcattagtcgccatcgccaacccagccccattaacaatattcccaatattcccctctagccgcacataattcagccccaattccgcaagccgatgctcctcctcctgttccggcgctcgttcctccatcgcaaaaagcccaggctgtctatagctcgccgcattatcaaacccaaatttcgcatccagacaaacgaactcaccatcctcagtgcgcaccagtggattcaactccagcaacgtcgcgtctttctccttgaatagcttgaacatctgcaccagtatctggtggatatcccccatctcggaatccgagaatcccagctcggcttggagatactcgtcgatctcatcagtgataccggtcgagagtccgaaccggagtttatgcagcttgtcgatattcgactcgatgtttgttccgcctgccgcggagatgagcagcacgggcgaggcttgctggcggtcgaatgtcattgcaaagtagaattcctgcgcgatggagatggcttttacgatgtagagcttgtcgacgcaaaggccgtcggctggggtttgtgctgttgttaggtagtacccgagcatgttggcggcatttttgaaggcttcggttggactgatagcggtttattagattggttcggtggttatttaggattgggaactcacgactcgacgtgtcgaacgccgctttggccgtcgctgttgaatttgcctttgccgcggccgcctgctaggacttgggcttttattaccgatggtccatctgtgaatgttagttttaggatatggaatcgaagaggatggtgtgaacttacttataacggagacgacatgcttggcttgctcgggggttgtaactaggaatcccggtggaactggcagtttgaactaggttgtataagcattgaggtaggctgtgtttgtgaagggatacttacttcttggagcagtttgtgtgagtggctttcaagcagactcaactgtcgtacttgggctttgagaggtgcatagtgctgccgatggttagtatcgtttcaatcactgctagattgtacgaacccgttggaaggtgcgcgcgatcgaacgccaagcaatcatcgtgagttatatctttcatgctagggtgtcagctgtcagctccaagaccattccgaggttcgatttatgtcttttgtgttatttggcgatgacatcaatgtatcgattttggctagttcctggggttgagtttccggaagtttatttgatatgaccatcgcttgaccgtgatgatttcaagtattttcttggtgcaagtatcgagagagcaggatgaagacttcaatatagacatgctcaagactattacatggccgagtcaattggtgagttctcgacacttgatattgctcgacgtcaaccgctagcaaaatacgtcactgatatcgaatctttcccttctacatcaatttaatcacaaatctcattccaaatatggcttccttacaacgaatatctaatctctgactccgagcctgatatctctctcccaagcaacgatacaataacctacgcgagccacacgagagatatactctacggacagaagtcggcgctagtgtatacacatggccataccgtgaggtacttcattgtagtgcaccagccgtaatctgagcggagactggatcctctggctgtcggtccgttccgggccatcgttcgaagagggcaatctcccgaattcctcttgataaagcatccatacgggatttcaaggataaacaatatcgtgtaagcggggtacaaggttcagggattagccgtagcacacatcacattaatgataactcggcgcatcgcttgtcaaaagtgggggtggaattttattccagtcgtcccaaagtagtgtgttggcaaaactagcagtttcaggctgcgccgtttgcttggcttctcgtatcggtccgatggtaaattcgccagaagatggaaattggtgaattgctttttttgcacatcgtcacgcgaccaagtcgcactgaccgcggggatggatgatgcgatcggccgcattggggccatagcgctgtcattgcaggtttcgaagagcctcaatctgtgcgcaaaattgtgggaatgtttcagggaaagtcttgctagaacctgttatggttctggaattcattttttcttgaaatgtggtgtaattcgtagtggcccaatggggatgtgcttctcacaggtaacgagaagccagtagttaaatccactagttacctttcttttctttgttaggccccaaatgctgtatcaatctagacatggtctatgatgactgtgtccgttgcctccgggtggctgcaggctatctctctgtctgagtaagacatctaacctcgagcacggcatcttactgtcaaattggtcaattagtcaagtctgtactcatctgatcgttcccaaaatctgacagacactagtaccaagaatgttttagcagtgtttcacgagtactccgtatgttgtatatcgttttcttcccttaaatggagaaataaggccccgcttctttgtatgaaccccgtgcttttagaccttgacagccctcacgtaagcgacggggcgcatcttgtcccgaaatgagactttcaatagcctcacgctaagaattgtgtaagaatacccgaccggccgagtcgcggagaatcatacccgggttcgcctggatgtatgccatggtcgatgcctgtagataggtgccacgcgggtaatcggaatgcgcgcagcgttcattcgccgacacaaatgaagtcttggcttcgagacaagcaatggacgtataacctgataaggttaaaccacgttgacttgggcgaaggtggaaattgcaacgtgggaggctatgcctattcgggcttagtcaggcgtgaccagcctccaagacaccattttctcccaattcagagatttcaatacaagttcatatgatatcagcgctagtgacgagttagtgaatgcaaaatgaaatcataccgagatcgccaggggtacgcaccacggagaatatacacagcaggtttggcttatcaccgtgaggcttagataggcgatcgcccctgagagcccagccacccagtgggcctgacttggccgacgcagagtttctggcaaatcaaaaggcaaagaaagcacatctgatcgctcgattctgacgctgaattttgtttagaaatataagaaaatggccatttcctgctgatgttcctgcaaatctccctcagtcatccgtcaccatgaggcagtcgacacccattctctgggttgtccaggcttgtctagtatggctgacattggtatcggcatcgcctgtcggttctcctgatctggtatcggacgtcgcgcttcaggcccgtgacaccaagccgtttccactccggattctgcccctcggtgcttctatcaccatggggtacaaatcgcccgatggaaatggatatcggaaatggcttcgacagcaattgcgctatgcggggtgggaggtggacatgattggtactatgaagaatggtacgatgcatgataatgtgagttacggttctgttcatcttaagaatatatactgactcttcaggaccacgatggacacgtcggctggagaatcgatcgaatagctgatcatgccaagacgatcatcccacaacaacctaatctaatccttctcaagtgggtctccgattgccgatgccatctccttgcatgctaatatgtatatccccacagcgctggcacaaacgatgctctacaaaactacaaagtaaataccgccggcgagcggatggactctctcctcacctacctcttcgacaacatccccaacacaaccatcatcctatcaaccttgacatacaacggaaagaagccgaaacaaggcgcatccatcagctcgcaatacacggaacttgcagcgaaacgccgagcgcaaaacgacagcctcgtcttagccgatatgagcaccttcattcggtataaccaattagtggataagatccacccgacagccgcgggctatgaggaaatggcgtccgtgtggtgggcggccatccaacaagcggagaaggaaggccttctcaaagcgccaaagactacctctacatatagtggtacgatcagcaaggcccgcgagaaggcactcgacgatagcacttcagacccggatctgcctgcgtacacggccccggctcagcctaccgtatcacttggtagcggctcgcctcgagccgagtggcatctctggactgcgttccagattatgagtatgttccctttctccctgtgtgtttgacaagactaaccttatcagtgggcattggtttctatatgatatgatgggacctggaacaaataatcaaaaataggcaaaacaatttaaaacttactaaatcgttcatcccagcctcataagaggcgtgcataagtctaggcaaataagccatgctatacctaacctaacgaaaccaacccaatttcatcactaaccaaccccattaatagaagcatatcctcttattaacctcggaagcacgcagcctcccaagaaaagcacaagcagtctccactatcctcggcctcgaactccaaccctccctaaccctagactctggccgacctcttcacctgtccccgcaataggctgcgtcgtccggatgccgtgcgccagggtacaggtccaccaaatcagaggaataatatagccgacatatcgcagaggcgcggcatccgggttagtgtggggtcgctgttaccgcgtggcgctgtcttggagtgtggctgcgatgggagttcttgacgggatgtctatgggattgcaccatttctaggcagatcaggttagttctagtgctcggaggaaggatgttgctgtacggggaaggccgggagtagctctcgggtgtctcgttctgaattcttttggggtgggtttgccgcaaaaggcccgggcgtgtagctatccttgcatggatgtcaatgcgcgttaatcgcatgtaaacttgatcacataactctcgccaatgagataaatgtagacgatggacgtagaaatcatacaacacacccggaatgtgagcgacagcaatgtcaacccgagaaattcccggccccgcggcccggcgacaaagctgaacttccaacctgggacaccatgacatcaccacctaagctccgagaatattatttcaagctcctacacttccgcacctacaacatcctctctacagacctctaaacctcctccctctatccaatccccccaaaccaaacccaaaatggccgaatcattcgctatcctccgccaacgccgctccaacgagctaaccagcctcgccaacgagcacctccaacacgacctcaatgccgaagaccgcgacaagctcaacgcagcctcgagatcaatctccacgtggacggccattgggtccggcgtcggtattaccctcggtcttgtcgccgccatccgcttccgcaactcgcgcaaggcgttcttctcagccattcgcgcgcaggatagacctaccaaggttatgtttgaggatggacggactggtatgttattttgattgtaatgaaacaaagatcggtattaatttgtgtcttgtgtgtagaggctattccggacctcacgccgctgttgaagcctactactctcggtgatttcgcgacttatttccttgccgcggctggtgggttgttcttgggtggagagcttggtaagattgtcgatcgtatgatgccgagttgaattgtgctaatggaattctgtaggctttgctggtggtgtggcgaaagggacgtggagtctcgacgcggatccccagagcaaggagagaattgagactgctttcaggaaattccgcgctgatgtgctgcggaaacaggctgatgcttttgataagggggagaataattcctatctcctctagggaatacatgtagacataaattggatcttaggtgtacacgattttgtaagatgatgtcagttattttcattcgcaatgtcacagtaatatacaagttataccttcaaagccttcaagaatgccgggctctcatagccctgcgcaaccttcgaaatcggcgtgagatacgcctcggacgattcctggctttcctggatcttccgaacatagaattgcgcaaccttgagccacatcgccttctcactcgcactggcttcagacccctgccaaacccagagtctgttcccagcatcgtaaaggaagacatctttaccatccaagtcagaccggtcaacccgcccatccttaacaagatcaagcgacaagtccccagcagcatcactgagtctgaacagcctgcgcgagcgaacaccctcatcaacatccttcttcgcaaagcgcccaggtctagccgcctccaacgtcgacggcgcgacatccctcccacccagcaaatcaacaaagatcttcgacctcgactccagctgcgacagcacctcaacatcaacatgcttcgcctgcgtcatatcattaaccacctgcgccgccttcgccttctccatcggactacacttcctcccctgccaaacccagatcttatcccccttatccaaaacaaacacatcattctcatccagactctgccatgtcggctcgacctcatgcacgatcaacgaatccacacgcgcaatgcctgggtgtttaaagatacgcagtaacgtcagaacatcctcccgcggctcgtgttcgacatgcgtgaatcccgagcgcacaccaccagaccggaccgcgtaattccggaacaaagcaaggaactcgtcagaagggtgttcctgcacctcccgatgctgcgtcgccacgccgtgcaggaactcgtccagctcggcggtcttgtaagccgcgacgccggcttcgtcttgtgtggtcttgctaccgagccagaagaagatgtcgtaggcgagcttggtgtcgaccttgtacgtgtgcagcacgatgaagctgtcgccgtcgtagaactgcccggttttggatttcggccacgggattacttggaagttctcgatgcgccagatgctcaggccgggttcttgggggaggtcttgccaggcgggttcggtgagggcggagttgtacttcacgcggtggtcgatgtcgctgccgattagctcgacgttgctgtctttgatgtcgtattcttttgggtggatgaggccttcgtggggtgccatggttgcgattggtgtctggtagctgtgttgtgtatgatacaattagagctgaggtgagtgttgataaatgataaagtgatgatagcggtgggtccatggggctgagccgcggggcatcattttttgggagcaattggccaatgacgtcgggaatgttcgagctactatttttagtcagtgcaacagacgtgatgctatgtttacatgaggctggtagctgtgggagaggctggatagagggcgcagtaggcgtttgagccaccatcgtggcatgtcagaagagatttttcatattttcgtcatccgttggtccatctgagtctgatttcaattcagaaagtgctggtgacagctacagctggatattaggaagagctcatagattgaacagcgaggttcatttgagtggacaaaatggaagccgacgataccaacgtgtcatgctatgccctgacgaaattttcagcagaaatttcatgcgcgagaggacacgcagcaatgtatcccacctttggggctaggtcgaggtgatatcactaatagatgtactccgcacaagatgctacattgatcaagtttaatcccaagtcctgcagcttgcatcaagtcaagtcagagaattctcaaatcctcatttacaaataaaaaccaattggtgtaaatcagtgcacgaatcgatcggctctgaactgaaattccaaatgtcctgaggtatatgaaacaccgagggaaaatagtatctacttctcataactctagtaactgctcgtgcctgatttcccagacgcacaaagcaccgttaccaacgctaagcgtcaatatgtcacgttttttctcgctcgcataaccatcgcgcacttttccatatcactgatcacgtttaccaacggccaccaccggcaccgccggcaccaccgccgccaccgaagccaccaccaccgctggggcgggcgttggcgaggttgacgcggatgcgacgaccatcgagactggattgtattagctgtgttcgtagtatggaggagggataacatactcctgctcgttaagagcgttgatggcagcctcggcctcctcagcggaagagaaggtgacgaagccgaatccacgggagcgaccagtctcacggtcaaccatgacgatctagagatggaacattagtgtcttgttccgaagcaaaaattggaaatttgtggatttttcacgtacagagtcgacaatgttgccgtactcaccgaaggccgcgcgcagcgactcgtcgctggtgtgccatgaaaggtttctagtaggactgtcagtataacgcgtccagcatcggaatttgatggttttggacatacccgacgtagatcttagacattttgaaagaaagtgggagtcacgaggtgttgatgaagagaattaaaagatgcggggcatctgaggagatatagggccttcgtggcggtgagaggcaaaattcattcgccccgcataaaaaagtgagcacgtattgccaggaggcgaaggagcagactctgccggatagaccagctcattcaatgccattttgagattggtctaattctaagcattctgccagattactattccccaatggagtctcccacataggtagctacatatgatctggtcttcctggacgcaatggcagaatttctagcgaacaatggcctgacggtactggaacccgacagaactaccttactactgtatgatcaacagacctgatcttcttactaagatggatcatgcattcgagcatggagccacagcgccaccatctagaccggtaggatgaggtacagaagtggatatggtcaagtcaatcttgcatacgcctccgatggaagatacatccgtatgctaaaaaacagcttccctacaattctccaccatctatctgcacgagcaaaaacaaaaacatacaacagtgaggattcgctggtggtcacccacccaactactaactcaccggcgtgtggcttaagtacggctgagcggacgggaagccctgttttccacaccctatggtcgtatgtatcagattatgtttcgaggaggattatagcagatggctggtgagtgttacgtaggatgggcatagtgtaggagccctaatttttcggggatattcacctaggactctgaatgggaagccaaagctatggagccactgatgagcactaacactaatgacggtaaggatatgttagtcctgcccgaactctcaaatatcagtgatgacatacctatcggcgagaccgctttttaatcatcttttttgggtgtagtgcgaaggcaatgagatgtaatcgtggattgcaaaggcgttgcagcggcttctaaggtatgaagggtgctatagagggatagtagaagcgtgtgagattcgtgatccgcttttcgatgattatttctcgactgtgcttggcttagcggcacagtctgaaaagctgagcgtcgtacctatcgatggttcacttgaagtggaaacgacgatggaaattgacctttttatgggtagagatgaagtttagagttttagcaaggcaaggccgggggtggataatatctcggatatagaatagtaaaaagaagctaggaagaatgaccgaaaatcgttctggatatccatcatgagttggcgagtgcgagcgaccaaggtcgaagtggtaagaagatgagaagaagatgaaggcaaaaatggagctgtgtcgggctaatgcattgaaaataaagtgccccagaatgatcactttagcggctgtggaaccgacaagtcgttgacctcttgaaatcgcgggaaccctggaatatgtgctggctagcatgcaaaaattggagattggctttgaaagacttgtaaatgtaacgtcatggtcatgaatcttggtcggcaaacttcgcagttagtctatctacgctaggcccctcttcactgaagccggaacccaagaacttcaagtatccccgagattcaaagatgcagccacgccacaaactgcctagcagaccttctcgcctaggtcagagcattcctggagacgaggagtctcgtctgttgttgggaggtgaaaagaagaactgggaccaaatcgagaaacaagaaatgagcagagtaaaacagggagtccggagtttctgcatcaaaatctcctcgattccatctatcctttcccaaatcatcagaaaacgcactagaatactttccctagaagagagtgttctacatgatatctacaagcatcttcccctggtcgataaagcgtgtctatcgcttacctgcaaacaactttacgatctatttggagcaatcttgaaagaaaaggaattggaattcccacgacttttactcattggtatccctatactatatgtgaatagtagcaaagtcccacgaaatcaactgctccttcgacttgagagtcgcaactgggcatattgtggaaggtgtttgaagctccatccccgaaaggaatttattcgagagtcgctcgcgcgcccagctttagagaggtcttgcgcagactatgcgggtatagttgacctatgccggtgtgttgccttgacgattcgagacctcgggtctattgcgaaactttttagtcgccctacgccgggtcaaactaagttcggtccattcactttttaccgtattggatcttggcctttcttgagacactcttgctcattacccactacacctgactacaaggctcggttcgcgatgcgtatatccctcaacgagtttaaccagctggagatgtctgctagttatggcatattcttttcttcccctgagactctaaaagccgtgcccatcttccactgtcctcactgggaccttactactttgatgggtcggaaggatgccacccaggtgtgtcctgggtgtcggaccataagtataagacatcgtcttccagaatccaaaggaaggaatgtagttgttttcgaagtgtggcggattttaggaaaccgtagggcaccggattaccgttggcttgataactgtcgtctcactgggccttcatatggacatgatatatccaggtaagtgcatggttgaatattggactgaatgggcttaacagcattattctagggaggaaagctcgcaaagtgggacgcgcactatttatgatacatgggagggtaaataccatggagcccgattttgccaacaggtagacgggccaacaccgacacttgattacaatatggcaaaaaaattgaaaatcgcatacaagcatgggctcatttaggtagatacagtcgaaggggactgcaggaattatactactcgagtgttaaattgaggtaacttctatagcctctttgctattgtatctcttttgggccttatttttccaatgtaactgccagcaaaggtattgctatatactacggttcatcttcttttctttctgcgcttgtgtcttgtaatacagctaatggctttgggacatgtcatgctggagcggatgtgttgtttcggtctaacggccaccacagccaggaggtcatgtaatcacttcttgatagagcatatgcatgtacccacgttcaattagaaaaggcaaaaattatgtatttcacggtttcagtctgcgaaaaagggatggcctataattacatgagttaaaaatatcggatagggcgcagaaagctgaagccggtaggttggtgatgctatgcattgaagctaccatattcttttacttactgtgattccaatatcgttcgaatattattcagcttgggtcttcatgcggagagaaaagaaaaagttttatcgagatcaaaatgaggcgttgggaaaattccaaccccaaatatgattatcgtctctgtgtagaattggaatgagagttctaactatatgagagaaaggaggcatatattcttcatgtttggcttgtaatgcacaattccaaatattgggatatatgggctcattcatcttcatcgtcactccttgaatatattttgaatatattctcgagtggtcagaatagaaaggacctaatagtactatatacaaagccctctgatcgaactagtgcttggataactccttccaatcaaacccacaatgcggtggtacaccactgtgactagtgagggtgggaacagcatcggctttgtttatttcaccgcatccagctagcaacgtgatgaaggaaatgaaatagttcacttttcaagagaaataggacattggcacaggctggagattatcaagtcgatgataacctagacagaacagtgccaatacatcgtcaactcatacaatcagccccaatattatctgcatgctgttgtaggtgaacctaccggggagaacagtgagggatatgacgaagcagttatcgttcaaagaggccaacctgaagaaaggaccagcggatatatttccgccaaaccattcacgccctgactctgcaagtcgaatgcaccggagtggaagcatcagatctagatggaaagtgtagctcaaaaagaataatgtcacgagttctactccggttgattatctcatctattgcccggatggtctagtggtacgttgcagtctcttcctcaagtcataaatttccttgctaatcccttctaggtggctttggctttgacaccgagattgaagcgtcgtatgaaaaggagtgcatgctcatagtcgtaatacatcgggtcactcgaagtactgtttcatcttcggctttttctatcacacacataggcagtgcctggtgcgatgcgttttaaaagtctaagtagatggttacataaattatgaatccgcctcataatctatcttccgcccggatggtctagtggtatgattctccgtttgggtttccatctcaaattcggagaggccgcgtgttcgaatcgcgcttcgggccctcattctttttttgtttgtttttgtttttgcttttcattatgcaatatccacctctaatttttcaccctctgcaatcccactacattgactgacccttttagctcgatgtctaagctatcacgatctagctccaaaatacggtgaggtgtctacgggctactgcctactccgtacacggcgaagcgtccggcaacctgcagcgagtggacggaaatttccccagtctgcggggaaagcttccaaattacgtacaagtttagctgttgtcaaaagcaagaggttcaggctatattccagaatacatagccagccagtctttccacattccgtgtctcactcgccaataaaagggagtggtccgaggccatcgtggactaaccatacatagtattaacctgcatgtttcaatgtgatatatgacaatgcaaccagtcgtgtgtcgctgtacatgcggagctcaccttgcgctttcttggccagggaaaaaccccttcattctagtcatgggttccaaatctagaccttggccggcgttggagaccaggggggaattccaaaccacgggaatttaaacccaattctcctgtgcggggattataaagggtgtacctgcccgccggcctagcagtaaacattgagcgaccacccacagcaaacggcgtgatgcagaacctttttctctctgctctggccttcagtgtcgcagccgatgcctatggctcaggggctgccggctgggacgcggcttattcaaaggcccgagcggtccttcccaagctgaatcagaccgaaaaagtcgggattgccactggcgtcggttgggaaggagggccctgcgtgggcaacacttatccagctagctcgatcaactatccctctttatgtctacaggactcacccttgggaattcgctttgccaatccggtcacggctttccccgccgggatcaacgccggagcaacttgggaccgtagtctcctgtacgcgcgcggtgttgccatgggcgaggaagccaaaggtctgggcgtgcacgtccagctaggaccagtcgctgggcctctaggaaagaatcccaatggcggtaggaactgggaagggttctcggtcgacccgtatctcagcggagttgccatggaagagacaatccagggtatgcaagattcgggcgttcaggcctgcgccaaggtacgctggcttccactctgttcatattcagtgcgttctgaccatggtaaagcactgtgggaacgagcaagagcacaaccgcgataccatgagctctaacatcggcgaccgcgcgacgcatgagttgtatgtatggccgttcatgaacgcagttcgggcaaatgtcgcgtccgtcatgtgctcctataacaaattgaacgagacttgggcatgtgagagtgatgctatcctgaacgatctaatgaaggacgagctaggtttccctggctacattatgaccgattggaatgcgcagcacactagtgtcaacagtgctttggctggactcgacatgaccatgcctggcagtgattttaatagcccgcccggcagcatattctggggaccaaatctcgtgcaggccgttgctaatggctctgtacctcaggcgcgtctggatgacatggcaacgcgtatcctggcagcttggtatcttcttggtcaggatcaaggctaccccgaggtgactttcagctcttggaatggcggaaaagccgctgccgatgtaacaggagaccatgccactgtcgcccgcaccgtggcccgtgattcgattgtcctattgaagaatcaggaacatactctgcctctacggcaacctaaaagcctggctattattgggcaagatgccatcgtcaatcccaatggtcccaatgcatgtggagaccgcggctgcaataccggcacgctagctatgggctggggcagtggcacatcggagtttcccgtaagcaagccaatgccggcagatcaaccgcgagtccgataaactgacaatgacgctctagtacctcgttggtcctctcgacgcaatccaagttcaggccagaaaggatggtacgaacattatccagagtacgaccgacaataccacggctgctgtctcggctgctgcatcggcggagactgctgtggttttcattaacgcagacagcggtgaagggtgagtcggacttgtaaccgcacctatgatgcattgcaactaacccgtgcattgcagttacattacagtggagggcaacgttggtgacaggaacaatctcgatccctggcacaacggaaacgagcttgtcaagtccgtcgcagcagtgaacagcaacgtcatcgtagtcgtgcatagtgtggggcccattatcctagagaccatcctagcgcagccctcagtgaaagcaattgtctgggccgggctaccaggtcaagaaagcggaaacgccctggttgacgtgctctatggcagcacctctccaagcggtaagcttccttacacgattgccaagcagttttcagactacggggccggctggaacagtgggctcgatgacaatttcgttgaagatttgtttattgactaccgccacttcgacaagaacggcatcgacccgcgctacgagtttggctatggcttatcgtatacgacttttaattacactggacttgtggttagcgttgctgccacagctgggccatcaaatggacgaattgtccctggcggggcagaggaaattttcgagtcggtcggcactatctctatcggtgtcgaaaacactggcgaggtagctggtgctgaggttgctcagctctatcttggcctgccggactccgccccaagtactccccccaagcagctgcgagggttccagaagttgaatctccagccgggagagccgggaacagctactttcgagctcactcggcgagacttgagctactgggaagtgcagacacaaaagtgggttgtacctagtggtaccttcattgtctatgttggaacctccagtcgggatattcgtgaggatggaaagttcactgtcacttagtgttgttctcatgctttggcttgtatatatttttattcggaaacgacttgtctcttgatgaatctgcaactaaaccacgactcaatgtatcgacagtttctagatccagacttgcttctttgttaaggttcgtaagtctttacccaatgaatgaccctatccctaagacaggtttctgtggggtacaaagaatgaaagaatgagctttgtaactctcccttttattatcaatgatcatagtattaagcaacttattcaaatgtatataataacgattggtataaataacatgttagtccttctcgaagtagcaaaccatcatcatcaataccttgatctatctcggcgactaacttatacagatccgcctgtcctatatcatctcaacgatttacccatctccaagaacaatggcttggtggaacagctctacacccggctgggtcgaaaatctcgtaccgacctacacacaagaaatctacaaattccgactcgaactcgaaggcgagattcagattctagtgcgccacccaggccatcagcatatagtaagccagagacttacgatgacagctagatccctgcgcaagatcaagacactggcgtctgatatctcggtgtatttcccggaccatccattcgtcacgcgcaaacgccttggtttctttcagactactttcccccgactttgcgattttatcgagcggactttgattgagctgagtagaaccctgattcatgatccgaaaagtgagatttctattgcttggcagcttcaggatatattggattctgtatagattgggtatttaatgtttcatactattcaaaatacttctatgtggtgaatttgattttatttagactatcagcatagatgattctacttattctcgctgttgagtcttttagcagcctcatgcatgtcatggtatatatttcaagcctcctattcccgaagttttcacaaccattgtcaattcaattcaatcctatctctagatttcgcctggaataattgctagcgaaaactcacggcatttgaacaatttgattcgtatctttttcgttgatttataaacatcccacaagcttggaatgagagtgcaaggaggctgggagtttgcgatcaaccagcccaatacaagtatgcgacagagaaaagccccaagacttggatttgacatgaaatctgtataaacaattttagtatatcggaatatagtgattttgaatgtgttgttacaaacttacctgccaatagtactgaggcttcagaaatgccgtggatgattatttctacaagtctaacaactattctcgatcatgtacaattcgaaatacctcaagtggaatgtccttagtaggattcctcaaaacaatgatgtccttcacatacaaggacaagacctcgcgtgagtccaagccaacttagaataatcccaagctaggccgacacgattaacatgcatttccactccggtcaattgggattcttacttccaattatatctgcctgtctgtttgcttctgtcgaatctaaatcttcggaacatccaagatcagccttcacatttgaccagctctggaaactcgagaagggcttctgggattcctttctctaccctgcaaatctcaaacagacgcaaggcaatgcatcgactattttcgcatcagacgtgagtttctccagtttctccctctgataataatctgacacattacaggtgcaaggtcgtgtcgacatcacccgcaccttcgacggcgacgagctaaaccgcgaatacatcttcggcctattcgccgatccagagcacgtcagtcttgtcggtgtcccgatcgcatataacatcactcaatttactgcgaacgacaacatcgcatccgcgacaaccgttgtcaccttcaacgcaaccagtttcggcgtccttatcccagtgacgatcgacacatggatcgagttcaacgccgacggcaagatcgcgcagtacgacgcaacatttcgctggtttgagtacctactggacttcttagtcgaaggagtcgcgacaaaaataaacgcgactgagcccgaccaggctgttgcctatgttgctgatttgctagccaccgcgatctgtgatacacatgagcagcattgcacaggttcgaaccagcagtatacagacaccgcaagttgttatgactttttgaccaagactgtgcgatttggaaaggcccacgagctgggtcgtaacacattgctgtgccgcgaggtccatgagcatatggtgcagtaccggcccgatgtgcactgttcacatatcggtcctggtggcggtggatactgtgttgacgatatggactacatgcagactgtactacagagatacttcaatgactcttggattccgtttggctatgggacagatcagaatatctggctcgctgattgatgggagaggcctgctggtaaatgtgggggaaatgatacgaaaatcgcgtcgacaaacccaacgtggtgaatcaaccgagatggactgcgacaacaattatgtcactcttcaggtctgcagtaagccatgatcccgtgtcacaagcaaattgaactcaaggttttcagaaacatgtactcgggtccatgctctatataccatatgtcattagaatcctgcgccagccaaatatagtatcacgatcttctaggagtgtgaccacggggaactgctaccgaactggggtgataacagattttcgcggaccatagtacgggctcacggacatcatataggcatgccattatctgcgccatcttgcgtgctatgtcacatcagacacgagatcattggcgcttttatagccccttgatgataaggcataaaactcctagctcatcctcagcctgacgtggcactgcactacgcggagttgtattgaacaaggggctgtttactgatctgcagatctgcagctcggagctttatgtgtgatatcataggatatacatcggcacaagtctccgacgtctccatcctgatttggcggcgatcatattttacattccaatcccttcgcacgtccgtttctagccgtgtttgatgctgccccagcttacaatcctccgaagagctctctattccctacgtaaagcacgtcagcgtcggccttttaaaaacgttgttttgtttaaagcttcaaagtaggggttgggttcaatatcatactccagcaagtcacattcaccagtgcgttatcataagtacatacactacatcgggatcatctgcccagcccgattgcaaaatcagcgatgtggttactcacaagctaccacccgtgtttgaggtagatacacaagtgtataattcccgctcggccgttgaagttgcatgccagccttattagtctacgtacggaaattccttccgtcacctggctgatctttaccaagcgttctcgccatcccttcgaacgctagacctccttgacatgatcaaacaatgtgaccataacttatggcttaatttagatgcagttaaaatggacacattcaccgttagaacttgcttttttgtctttaacgtccctgtctatccagaccacagaattcaacatcaccaatatggagagaagacgcccttcatgcagcgactcactgcctcgcagtgaagcacagatacgcttgttccccgagaaattcgacgaatcgtccacggacgatagacaaaagttaccacctgtcgacggaggtttccaggcatggatgttcctgatggcttgtgtaatgttggaggctttgatatggggtaagtcagcttgcacgactctaggagatgacagccgactaacatgagcaggatttgcttttgcattcggagtctttcagaaatactatcacgcccatgaagccttccaggactctaacatggtagctgttgttggaacatgtgctacagtgagatcaccaactgcttacgacggtctatgctaacacaatcgacagggaatatcctatttgagctgtccactagtcattattgctatgatccttcttcctcaatggggacgctggttctcatctataggagtgataataatgtgtctttccctagcactgggttcattttcttccaatatcactcacctagtcctctcccaaggagtcggcttcggcatcggcgggtgtatagcatacagtccatccatcctgtacatggacgaatggttcgtccaccgacgaggactcgcgttcggcataacctgggctggctcaggagtatccgggatcatattcccgattgggttagagaagctattgaatcgctacggattcgaaacgactcttagggtcatctccgtggtggtgttcgttctcgctgcaccttttatctactttcacaaaccccggcttccggtcagaaaaacagtcgactatcaacgtctgaacttccgcttccttaccagcaggatattttgcgtctaccaactcggcaacatcatggaggcattggggttcttcttgcccggaatttatctgccgacttatgcccgtagcatcggcgcctcggattttctctcctcgctgaccatcacgcttttgaatctggcgtcggttttcgggagtgttactatgggccatctggcggatcgataccatgctgtcacctgcattaccatctcgactgtcggcagtacactggctgtattcttcctctggggatttgcgacaaccctgcccacattgttcgtcttttcgatcgcatacggtttgtttgcaggctgttactcggcgacatggtcggggataactcacgaggtccgacggatcgacccgtccgccgacgcaaccatcatcttctcggttattgcctttggacgaggaattggaaatgtcgtcagcggccccttgagcgaggctatactcgaggtagatccgtggaagggctccgcagcagcgggctatggcagtggatatgggctgatcatcttgtgtacggggatcagctgcttgttgagcggagtatgtatagtggcgcattatatgagatgtatataggcgggtctcgttgcacatttatgctgatgattaacgtctgcttttggtgggacaaaggatggttaagatcgctacatatgctactgtttcgaactgatgggctgccagtctatcagttattttcttttccctttgagcatgacccctctatgttcaattccaatttattttatgcatagctcgatttatacaaatctcggaaaggcttgggatttccctgaaaagttaaattgcgatatttatagcggtccgccagcatccgggtgcgaaggagtatatcattctactcgccaccatgattgctagacatttccatgccgatattcagggactataatgctagtaggtcgtagatttaagatcagaactagtcatgtaagctttaattctatgcaacagtcaaagttttatcgacgccatcatccaagtcaccggggtcgaccgggtaccctgatgatctcacccactccattttggatcttgaatctccaagcgtcgatctctatactcttttatatcaaaatcatggcccaagcttggcctgctcagtggtcgacgtcatcccacaaggctacggcaatatggattccaccacaccctgctctcacaggttgatattgtggaccatgacgccaatccagaggaaacaaccggttcttcaggaagtatacttcaattaacatactcggaggctgccgcatgcgttgcgggggcgatcatgactctagaagactcggagattgcgcggttttatgggctataagggtatttaactacccatgcacgtagctagtcttctgttcttcacaaaaccttacctagtcactctataagctacctctataagcctcctcttcagagaccagattactccaagcgcaatgcgtctcaacatcgtcagcctcctcctggccggagtcaccgccacctcggccgccactactactgctgccgcaggcgcagcctcaacctgcgtgccctcatcttctgataccactgtcctccaattcgccctaggagtctccaacttcatcggcggctggtacaactcgaccgtgaacagcaccttcggcaacaccaacaacgccacccttctagcttatcagaagatcctcttcggcctggagaaggacaacacgctatccagcgccgccatcgagaaagtcggcgccaaggcccccggcttcaccgcgccccagtgcacctacgttttccccgaggtgaacaccacccagacctgggcacagtgggcctaccgcttcgaagacaccgtcactggtgccttcatcggtcttgccggctattccgactcccccgaggtctccttcctcctggctcgtctggctgctgagcacagcgcgcactctgctttgattggcagccgtgtgaactctacctactttgcccagaacactacttctctggtggcggcttacggcccggctcagatcttgtctactcgtaaccagactggtagccttggcgcgtatctgggtggttgtcttactgcccctactagcccttgtggcacgctgagaatcggacctttggatgctactccctctccttcctcttccggtgtggcgagcaccagcttggctgctgccaagaaggcttagaggtcattggttgaatgaaatatcaaactttgggtttgatggaatgttgcaaaatataggattgtgtattaatttggtcaatttgaggaggaatatcgctgttttaacagaacaggatgaatatatgacatgattaatggattaaatgggaacatgtcatgacactattgttctataactacatctggtttaaatttgttaatagacctcgggaaatcgctcgttgagtctcgagttagacagtcaatcatgatgtcaacgaccattaaaggaccaattgaatataaaccaagtattgtttgtattgcacactcatgaaaaagatacctggtttattacctagaatatttacaatgtcgtaaaagaccccgtctgctgaagattcttaatcctcccaagcaagaactccaactgcctataagccgcgccgggagtgtactgtgggatctcatgaccggcagtatagaccgagctgaaggtcagaccacgctcggtatgggccgttccgagaataccgccaccggaatcagcagtccaaggcgtactccccgccccattagcaatatcatcgagagcagtcgtatacggcacaaacaatggcccgtcaggaggtctctggaatccctgcgctccattccaagtcatattctggattgtagcgagggttccgttggcgaagagcaggtaatcgtaccagccatggccgatgaggacgttattggtgcgctcgatgacgctagggaggggaccgagtgcgctgggaacggaattatcgccgtcgttgaagattcgggggccgcagactgcgtagtttgttggtgggatgttgagggctgcttggacggcggtgctgttgaagtagttgttgggtccgccggctaacgaggggaagcccatttcgtcccagaggaaggggcagaagtctgttaggtggtacatgttgaagcaggggttcacgtagattgctgcttttacgatctcgtcccagacgtcgcagccgggcttgttggggtctggtgcggtcgggaagttcttgggtggggggtaggttagggctgtgtctaagaatttggtgtagccgcatttgtcggcgcggtggttgatttctgtcatgaaggtgtcgttcagtgcgaaaacggaggagtagtggttcagcgctgccactgccggggctattggacatggttagtatgaagatttttgtggtggagcaacaactgaccatagatcataacatcatcatcattaatggaagggtcgttaatctggatgcctttgaggttgaaatgcgtggtatcgttgcggtttaacatcccgtctgccagatacggaatgtattggcccgcatagctctctccagtgaggtaaatcttgtagccctccatgctgaaggttttaatgaagcgctcccagaagtcgttgaattgattcgaaacatcgatctcattttcaaccgtggatggtccgggggaaaagcccgtgctggcaggctggtcgatgtagacgatgttggtcaatttggtccatgagtacgggttgcgcacaggctcgtacactccagattgccataggaagggtccattttcttgtaacaggccgtcaagcgagctgcatcctgggcctccattcagccagatggtgatcttcgagaattagacgaaactctgcgacggattgaaatcacgtacctccttttccgcagctgggttggtagacgggaaaaaccagaagaacaagctcgattctccatgaggcttattcgacaaaagaccggcatagctttcgccgatgtcgaaaggaacttgtgggaagtgagttccgttcacttggaattctagaagaagtggttgtaagtgacagtctcagatcccaccaagacatatttgcacttactttccgtcttgttattcagatactgatgctcagtcaaagcagcgggaagctctcttttgcgcagaccgttcgcaggctttctgaaagatgcagctctgccatgcggattttgtaccgccgtggccacggccaccaacgaagtaaaggctgccaaaatcaacattattcgatgatgctagagaaccagaattgaacccaagagcacggaaatctgcttttataaccccatcgaccctttttcaagacgctgctactcggagcgatttgcgttccgtgcggatattcacgcattaccaagctttgccaatagagatcgtggctagttgagacaagacccgctgtgaggcagacattggtcgctagccagcgggatctgcagcgactgcaacgtcgtcaggaacaaccggcatggcgattaattgcacttccttttactccgacggagtccgttatccagcgtatgatgcagatgcactcgtagctcggcccgctgtccataggaagatatcagtgcatgtgaatgccatgtttactgagctggtacggtcgcggtggggcgagataatagtatctagtatctaggtcttttagtgaaggcatttcataacgtcaaactagatgtcaatcctgctgcctgtactctatacccgcagggtctcaactcggatcaaatcaatttgataccacccgaaggttcatgacacatcctgagatctaccaaggtagataccatcaatgtatatttccatcgcatggataatgggttctattggatatctggtggattttaagatctaggtgagggggagtcagaatgagtactccgcactccgcatgtaatgacatcctaggcagaaaagatcaggcgacaagcaaaccttaggcattcaggcagcaatgtattcaggcaacaaggcatcgaacacattttaactatgacgtcaatttgtgcgttttctcgacagcccaccagatcggctgaagtatgacaccctacatcgagtagcacacatataagctgaaaatatttacctgtaactctgcagcgataacgctgatatgctagacctcggaatgtcgaatgtccctataacagacaagatgaaagctcaatctaatgggagtgcgatcataattgtttcttagtacaaagtgagcagagagaggtgattacctgtttaggaagcggatgtgtggggaagaatccatccaaggttcaaattaagctattaagctcgtgatgatgatatggtgaggtaactgtacattccgcagccctccgctctacgaattaggaaggaacccaagctgtcattattatcaatgtctggggatggaatgggggactcgtgccctgcatctctgtctgtgaggggcatacacccgaccggcacggtgtaacaggtgacattcctcgatcggcggggttgggtatcttttctatatagatctgccatcccagagctagatcgtatacatccagggcaggtggggtaattattcagggtccaggggtttgaagaagctgaaatgggcccttggcctttcatttgttgaattacatacatgattaatccgtatagcattatcaatatcgattaaacaaagttgagtctcccagataatataaccgtaaactcccgaagacaaatgattaacacatgaccttttcccgtatcccaaaattgaaacccaaccgaagcccgaaccccgaatcccaagcccattccgatattacccatcgtcaatccgtgatcatcaattagtcgtcaggtcgtgaattgtcgagacccgtttaatgagtattgcgtcttttcttgagtcgcagactgattttctttcgtagttcagagaacgggttcaccaaaggacgattgtagaagggatcgttcttgaagtcctcatcggtgaatttctggaacggagtcagtcatagtgatacagtaagataggaagatggacataccgtgccagggaggcgcataaagttaccagaaaagtcattcatcatgttcgagccctcttcgtaagagtactcctggccgttgcgatccatggttccaggaggatagaaagccacgccatccaatgggcggtgactgtttagggcatcggcaatcttgtggtgcggagtagcccggagggcctcggcattggattccttgacagcctccagcgggctggactgactgaagcggttgcgctcagggcgggtcgcgtcatacggaccctcgtggtgataggagaaattgctgacattgtccagcctgtcgatgatatcaggctgcacgatcatcgagtggcggttggacttggtggtgcggcgacgatggggagcagaggactcgcgtttgcgtctcggctccaccgggtaatgttcgggtgcgccggagtaccagatagaaggcgtcgagttcagtgactcagaacgcgaccgctgggagtagccagacggtgctggcgacatgaagcgggcatatgggttgttgctgcccatgcttgctcgcacgtttggtcgatcttgattaagttggttgaagtgatgactcgaggccatgggaatgcagtcaactgccatttcgaagttgttcgaagtgtttttatgagatgaagaggtatccaggatgaaaggcgcagggcgcaaatattacccggtgttataagtaagagtaagattactgaatttagaacaggtgaggctgaactgcaatgcaggatagcttgtatagtagctgaggatgtaatagaggaagagtgtaagagaagaagagtgaaatgtatgaagatgggtagatgtagaagggagaagagcgagcggcgcaagaagggcttatatcaaaggaagcagcggacgtgacgtgacgactcgctatacctatgctttaatgatcctcgtggctagacgcagtccaggagcctctgatggggcttagaacctcatttgaattttccgcgactgcatgtaccaattatcactgagaatagaccaccgggtggatcgagatgttaggtttactacttggccgccgattcccgggacgtcgacggagtatggcgttagtgatatcatggtatattgtcccactcaatagtttctactttcgctaaatcaattggagtggattacaattctcctattcgattcgaaaataaatcccatgattcaccatgcagaaagactaaatatatgcaaggcccatgttgcattccacatccgagacttccacgcagtcagtccacttcccgacccctatgacgatatccctggagtactacctccacatacattttcccttatttttcaacgtcatcctgccatctgaagaagaaaagtcaatttagatatcctaagtagtcgtcggatatcttatcccgaagtctccgatgactcgtccatggattaagctcatcactaggggaaatagcgtctaactggtctcacttggcatccgaactacccctggcctggtctagatctagactctatttcctccgtaccttcgttgggaaatttcttcagctatttagcttttcaccgctttttgctccttgctacgattcatgtgcatttcctcgttctacaacatacacgcatacaatctgaacggatgtcttgggatagctactcatgtgtagggacgacgcaactaattttgaaactgctagtgtgtttgatatttgtgtggtggggcgatatcgactccatttctataaatatccagctgaataatataactagagcggtgcacaaataattttcgcatgcataaaagattaggtgatatgtagctggtcttcatataaaggggctatataaggacacagagcagaggaaatgaatacaggccgatgtcgcattgccaccattccaaaggtggaattgaaataataatatcaagagtgttggtcggtgttagttacggttgtggctagtacatagaacacggacattgtagagttttatacttagaatgtcccttcgatctcatttcacagggaatactaaagcaatgttgatcctcagcatctttactaacaccggtagtgctatgtattccagccatatcgcatatcaccttctcaaaatcccccagaaaggggagggcctcgtttaacgaaagacagtcttattcaaggtgagtgcgttttcagaaaggtgacataatattctgactttggtaaagcatgtggcagactgcgtgcccttggagttggccagtctgtcctaattctaatcccacccgaggtcagtcatagcatgcgccgagaaaatgatcttgtgacctcgcttgacgtgattcgatgggcactcatgcaaacttgcgatactctgcaaagcttgaaacctctttgggcctcacaaggcttgcagtattataagaagagcagattgtggggtagtctcattgagggtagtacacctgcccaagatgtcgtttcatgcattcaggaacccgaagcgcaaactttatctcagctttatcatccatcggacgttcctagggcgtcaagtctaaatgagaatatagatccaagtgatctcgtcgtacgtggtatggttctagacggcaaggtaccgacggccaatcatttctagttttatatatggtatccgcttcatgtatcaatttaagactaaagctccttccttcaatcttactcagttactgtcttttgttgaagctctcgccacggttttgaataacatcgaatagaatttgattttgctttatctgaaaattgacttgggcatgtcatatcttatttaactacataatgtgaagcgattggctacaaaggaaatttgactctgtgcagttaaagctcttgtcttcccatgatataatacagttcgaaatcagttccatcgtttacacaaggagacttcgtctcacctacttctaaaacacgctatacccattactactactctatccttatgttaagtgttggtctgggcactagccgggaaacaaagtatgtgtcgggggggtactccgtacagtaatatgttttcgaatgctcttgatcaacaatttgtttgaaggatatacacgaaagccgcgcaaacataatcaggaataacaatcttccacttccgccgtggaattcaaggttcaaggcgacagaacctctgtgatttagtggtgaagctggtttcaatccgtcctgtgaaaggagtgagaaacaaaatgtcttcacaccacgttcagcgcatcttagaaccaaaaggacttacgtgataacctgaaaatttagggggtcggtgctaaaagaacgctggcacaagccccttgacatgtcccaaaagccgaattgcaagcaacaatagaggcaggtgcgctaatacccatagtagctccccaagtaaaacccgctgctgaatagcaagccatgacaaccgcggcacatcctgcttggcataccccgtacgcggcaggtccggcgagcaccgtagggctaaagagtaagagattaagaaattttcctcgtgagactctcatttgttcgggttcgaatcgggtttgaacggtgaaatagcgcctgaacctggggatgcaatacgaaaggaagcagatggattggtatatgtaccataccaagagaatgacatataatattttgctggcacaatggctattgaatgaagctcgattactggtgattggtctctatattgtaggcctatcataaaatttaacgtaccgctgtttccgagaaaaagataaattagttactcacaacgtagatacttatactgcatctgatacatcatatgcaaggagaattgaagactcacattcccttcttgcccgacacggactacctacttacgaataacacacccctgcccatatacgaggatttgataacatagaagtctcctgagatgatgatagtgagccgctttagtccaaaggcaatgttccaagtccactattggcgccttgatatttacagtgtattaaggtatcattaagttgctttcaagtggtagccgtttcgaacatggctgtgcagcggctcaaagctctcgctttcattttgtgaaacctgttcatgaagcgtacattggtgaatctccacgttactaaatccgtacgttgctgaatccgcacaaagatcttaggcaataattatgacataatgtgagaatagaaagaaagaatatatgacaaatgaaagagaagtgccaatatcaaaaactgaaatttatagatgaaattgaaaacggtgattggtcgcctacttgaaattgccccacatctgagaaatcagacctccatcaacacaacaactctcctgtcacatcggatgagatgtccctagtacagtattctgattcggaatccgactcagaatctagatcttctcttcgcccggccaaaaaaccttgccgcaacatcaatcaaggtccatcgctgccgcccctacctgcatcattccatagcctctatgcctcgagcacacgtgtgagtgtgcaagatgatcccagcctccatggcggccgaaaacgcataattcctcacgtagaaggaaactggccaacacatctttacctcgaatgtgagtactgagcgctggtgtaatgccacttgtacaaggagctaactttgatagggtacccggggaaagatgagctgtcgctccttgcagatgtcatctctcagtctggatatgtggcagaggaaaaggcacccgtagtgcacagtcttctccacagcgatctcggtgcccagttaccccttcatatcagcctgtctcggccagtgattcttcgcactgagcagcgtgccttgttcactgaggcgctagaaaaggctattcatgcctcgcatgttctatcgtatgtggccaacttacaattcttgatcatccgctaatactttgaatagatttcatgtccaaccagatactttatattggtcatccaattatgaaaagacacgttggtttctcgtcttgggcgtgcggagaccgagccatgatggtctgaaccgcctcctgaagatgtcaaacgagactctcgctcgcttcgggcagccgccactttatgcaacctcttcgactcaagagcaacagaccagtgcatccctccgtgataggagcagcagtcaggagcgcgaggatttctcagggtgcttccatatctcacttgcttggcgtctgtcagagcctagtccgaaggaatccgaactggtagccaagatagatttgcaaactttgcgggagatccaggttagattcgattgtgttaaagcaaagattgggaatattgtcagtagcataccattaggaaaagggataaaatgaggttctctttcagtaaattgggcgttgtctcttcaagaacatccaaattcgaaaattattacctatgcatcttgcttcagtgctccagatcctctcttaaatcatcgaaagtgagacaaagtagtcgctgcctcctatatttacatacaccttggtattggtaattacggtaatattacccacatgatcgcgtcttcccgcgacaactcccttctttctcatcaacaccaccatgcaggtcccaagtgtaactctggtaagcttctccatcatctgtgatcaaatgttttctaacctctctttcttctaggatgacctcaaagccttccaatttaagcacttccctgggcaacagctggctgtgtttccccaagaaaatgaccagaccacagacgacgatctcggatactatccagacggagtgaagcgtacgctcacagatgagcagattcggatcttcagacacagtgaagttcatgctcttctgcgagcgaggcagctccagaacgatgaggcgcaataccaagctcggatgcagtcatctatagatgatggatcaaagggtaaactagatactgtacctgaaaagcgacctctcgacacagaatctcagatgcaaggcggtgatcagaagcggctgcagtcccagaaggggtctaagcaacacaccccagaagacacgtcttctaagctggactacggggatgactctgatcaaacacaaatggcaaagccaccggtgtcacagacgccataccaaggtcgcaggattatctcctacaatgactgatctcctggttgagtatccggaagcccctatattcaatctaatggacaaacccgaatgcctacacttcccactgcactgacaagccggtaagttatccacattctattccactacacccttgcccgttcatgatgaatacatcgtatcatccttagccggaaagccataccatctgcggatgtgtgaggcattggcgaccttaatcttctctctgagggcttcttcatacctttcaatcacatgcacatatgtttatttgcgattctaacggcttatcagttatggtactttatgtgggtgcttttgacaaagagtttcacttttcgcatccgtccaaaggaccgccggccaaccatccagaacaatgctctcaacagtctcttcctatcattggatgttccgagcgatataactacaagacacattctgctggccctggggtttagatggtttgacacctgcttggtctcgacgatactatccaaaaaatgagcgactcgccatccttgtcagtcgatcaactcactggtacactgtacagctaacctccatctggaattcgggttgccgacggcgtaatcttgctatcctttgaatgcgtgaaatccttgaatatctgatcatctggcttcgggggctctctcttttggtctcgttgaagattgatttcagaaccgtcagtgtcgtcacaaaatgagcaagcttcatcatatgtgcttacagtgccttgaactagcagactgttagcagtgagcgtaacacgagccccgatcttcggcttatccgataatcaagaccgacttcaaaatgaaattttgactgagctaccatctttcatgcaaatcctacaacgtaatattcttagcagagcgtgctcgcagccatggcccatcccagggacaaaatatattgtcacaggcagcctctcatcactactcgcttctcatctccactcagacgaagttcgcaactgaaaggatctgaaaattccatgctggattcccacattcgataatcgaactgtttagagacaccgaggatcaaaaccaggtgccccgattgacccccagcagagaagacaaaccgagcctttcccttccccaaccttctaaggtgcctgcaacacatacaccctccatattttactccttcggcagtgccacctggctccgttccacctcgcaacaacagaatcaacaaagcgttcacagaatatgaaatacgaatcactatacccatagcagcaatcctctgcccgccaacaagcacagactaccacgtctgcgcaatcccaaccctgttccaagcttcagccgggtcggtatgctcccacacaagactgcggttatataacgcacattcgcgaacgcatgcttgactgaaataaacttgtaacctatgtctgcttgatcgcctgcgcgagttcagccttataactgctacagggtcagaaactaaaactatgtattattatattagttcacctctatctccaaacaccactatagtgtgtgtatgaaacaagtatccaaggcaaagccaactcaagcagcaactcgagatcgaaacaaggtatcgaaagtgtcaaaacagatgccccagatgcaaaaccagaacgccagaaaccccttcccagatacacttttatataaaccaggctaacccaacagaaaacgcatgcagctaagcattattcccacaagaaaagctctcactgctagggttatcatggagagctttgcccgagacccaaagaccaagaccgcacaacgcagcaccaacagaaataacaacgatattcaacaaagtgagggcaatcttcctcggcgacgagaaccacagacccttattcataaacaaccaaaagatcccactcaagccatacgtaaaccaactagcaaagagcgccgtgatcaagctgagcaggttactaaacacgggaatcgcagcggaaataatccacgccatggtccacagcgcaagcgcaataccgacccacgagcccgtagcgatccagtcacgcttgtgcatgcggtccgtaccctcgaaaacacgcaggtagacatacttgaacgcgacgtggccgttgatgacaccggcgatgatgatagtcggcagcgagatgccgtacgcgattttcgcgaccatcggcgaggcggagcccagcgctggcgaagtcacgtcgtcgccggcgtaccggtagattactaacgcggcggtgatgtacaggcccatgtcgatgccttgcaggagacagagggattttgtgaagtcttttgggttcctgagctcggccattaggccgaagaaggccgcgtggccgcagaaagcgaagacgatattgcagactgctgagaagccgtggtagaggtttgtgtcgacgactgcgacaactccctgtccgggtgctgtgatgccgacggcgatcatgacaattatgactgatgtcatgatgcttacgaatgctgggattgttaattgggttctcaatggggtgtatggaaacgtacaaacgatggatagccatgacatcttttccagagtgcgaggtaacgagcagatgaatgagatgaccatgccaacgatgccaaagacgatggagcaggtgccgtggtttgtgatggtgttcatggcaacggtgaaggtcaacaggtggctggccatgataaagatgaagaacacgatctgtgcagcgccgaggaattcccgtccccatttccctgctataacctcaccggcgtctgcaaacgtgcagatgtgtggatatctccatttcatctgaccgatcacatagccggtgtatgtggccattaaacctaggaagaccaagacgaggatcgctctggatatgattagcttcaattcctgcacttgaggcagaaggtatgcttacggaagtagtcccagagctgccacagcggcgggcagtgagagcacacccagtgataccgtttcagcaaccatcactaatagaatgttagattagggttggtttgatatagcatattatcacatacgcagaccacattgcctaacaagatatacgttaataacagagctaccacttcgagctatgaaacataccaccacctgagtactttgtacttgacctccgcgaactcctcgtcgccaaaggcatcttgtctgactttcgggacctcaaacttctccggatcagacatcaagtccgcgggatttatatagggactcttctcattggaatcgaaatccaatgcagaatgcgaggggctcatagcgcagatatcaaaactagcgagtataccagtatacccgggaagtagatatcacgtcaggaaccgaacaaaaagcgacgaacaaaaccgaatcgcttgatacaccaaatccaaagagagagtaagatcttaacgaaagggaaatggtattaaaaactcgaattcacaggaaaagcacccgccaagtcagtaaattgaacaataaagaatccgccacacgaaactgatgtggatcgccgacctgcggaccgcgacgacgaatcacctcgtcgagacgtaatggaaaagccgaaaaggacttggtctgctggattcgagtgagaaattacactggtgaaaattggaggaaagaaaacttcgctccgatgccggcctcctgtgcgaggttggacctggctgttctacaggagttcaggtctgcgagggtgaaaatttctataggaggtctaaattagaggcgactacttttggccctgcagatttgggaactccatctgataagcttatttatgtctgtctacggggtagcctatagggatgaacttgcacgatgtcgtgctcacgccttttgccttaaattgcacgacgcgttcggatatagatcgggtcggagttggtcgctagttccggtttcttttgatgaaccacacgatcttataaggatatatgggtcaactattcttgttttcattgaatacagctatgctttcatgggtttctcatataagctcgcatctgtcttcttcatcaggttcaactctgtcgacacatcctattaacagaaagttgatctcaacgcatatcccaaggccgctttgaaattccgatgcgagggctttgtatgagcccgacgtaacggcgacatcacacaagagaacccctagcatgtaatactggacgtagatagataaaaggtaggccgaccgcccaggatgccttcatggttgcaatctaccatgtagtcaattttgcccatgccgtttcagttcaaccagtagtgcttctcttcaggtggcatatatagcagcctcacaagaccccagcagatgaataaagccactttcaacggctttattttctcttcgagcttcggacggctccgtctgaaaagagcctccacagggagacgcttgcgtgttctttatcgatgtcgttaattgctacctccaaggcacaggaaacagcaaatagttgtaggtgctcaccctgtgggatgaaggtagaccgactcgccagctgtggggtgttttcgcttgcgactgggcttgcgactgggcttgcttttgacctggacatggtgctgggagagtcgtctttagtcaaactcctgtgcgcaggattgaataggacttgtcatgaagattctccggtggttgaatatcatattcacctcattagatttcctagttaaaagtaaggggaaggatgattagctgtgattcggaagttatgacttcgctagattcaccattgttgtctgctgagatatctgatgtagaatctggtttagatttttagattcgatcatataggctctgcgattcaccttggttgctagcgcaatgctcgtattcactctctgagtctggcgagatgcgcacatcacagcgtggtatagtgaggaagaagcgagatataagaactgtgatatataaggaagatagatataggagagcagatatagggaagacagatataaggaaagttaagagatagacgatccagggagaaggcatctggctatataccgagaagttgtttgtcaaagacaacaaacacatgtggcatttgttcagggaaggtgcaatggagagtgtcgcgctttaggaaggcacatgggttcggggtataaaaggagccctccccccatttctcctcttctctttttcttctcctctccccatccctttgaccaccatctcaccgtagccccccgagacagcgcaggcagagggtctcgtagcacatgctgcttcacctaccacagggaccatgacattaccatatgcatgaggtccttgtaggtctgcatcaaacaacaaactggtctttctcgtggacgttcctgaagtcgtggctctcattgccatttgacgagtcctacggaatacatgaggggtgtaaatcttcgtagccggttctctttgtcaactggctatgtatcaatatcaggaaagcaactgacttcttgttcttctttcattcaatcttactcacattcatttgcacaagccacttatacggcaatcattcaagtcccgctatggcacctgacatctcgaactcctgcctcgctgagcttgctgtccagaatttcctagaaagaagctacccaacacactgaagagtcaggatcacctcctgcctgagatctcaaagacggctacaccaagtcatgtctcctcatcggactacgcaatcaattcttcatctccttctatgctgagcatggacgaatgttcatcaaacccatttacacacactggtaacaccgattccagataacatatccatccaattgtcaagattgaccatgaattaactaatgcacctgtacataaatgaaatatggaccttatgtagttagccaaacctatccaggaatgaatcccatccatccatccaccaccaacgccggcggactttccagtccggaaatgacaagcaaaacgaaaaacaccatgctagtaaaaatgctatacaacaaaaaatgtacaaaaagaaaaccatatgtttcatgcaccatgtcaccccaaactccgccgtttaagtctccgcctcttccgctgcgactgctgaatagaatcctcgttcaggatatccggcggcagctcgaagtcctgttcgcccaggtcagggaccggatatccgaatgcgagggttgagcgggatccgccgcggcgtgtgccttttgttgcggcgatggctgcttcgcgcacatgtcgttggcggaagaaggatgtgaatgggctgtcttgtggagctgggttccagaagtgggagagggagggttgttggagccgtatggatttttgggttgagataggagctgggtgaggtttagtgggtgttgggttgggctttttgcgtttggggctggggtttggttcggagttgttggtgttggtgttggtgctgggaggaggtttggtgatagacttgcgagtagcgggcgctgtcttgcgccgtttagctgcgctcgctgagcgagcttcttggtgaagctgacgcgcagccaaagcgtcgacatcgcttgggtctgggtctggctctgcgtctgcgtccggcgtgccggtccccggggccggtgagctgtccacgggacgagatcgtttgcgcgagtgctgttgcgaggtattgggtgttgcctcggtgcctggcaccgggagtgccttttccctttccagtttgcgacggcgctcttcgtctttccatgcttggaacttgttgaccagagtgactagctcctggattaggatatcgcgcttcggctcgtagagcttcttgtcgctttcgtggactcccgtcaggcccatcatgcgtagccagtcctggccgcgtagctcgtccaggagacgctctaggacttgctgttcatgttgggcgcggttgcgctcgatgttgcggagttgtttctcttgtcgttcgaacttgcggtgtgcgcggaaataggtctcttcgctcagcgggtcgactgcgggtgtgcctgatgcgggtttgggatgtttggggcggatcttttcacagtcgtagagcttgagtagcgggttgccaaagggtgtaggctccgggttagagcagaatggtagtggtcgcgggaggtcgtccacgagagtgatagttgttttggcagcaaggaattctatagtaaccaatatcagccatgcgctcgatccattcaggtcgagcaacttaccaggttcgggcacatccaagctgataatctgttcgtagttgtggaaatactgcgcaagctcgctcttgcaccgtgacccggtattggtcgaacgcaacgaccgtctctccgaccgtgtatccgatgcaggctcgccgtcgctcctgtcccgcgtcgggggcacccccacagcaccctctgccttgatcgcgctctcgtcgacgtcatccagcgatcgattgtcattccgatgagtcgtgcgagcaggcgaaaccgttggcttgctattcgcgtccccaatcgcaggggtcagggtgcgctgcttcgcgaccgacggggctggcgagatcgtgtccaatgggtctggcgactcgtgcacgccgcgcaaaaaatcggcgccggaggaggttccctgatcgcggcgggcgcgtggggtcctgtaaatgccattgccattgccattcccatttgcacatgccggggtcgccaattgcccggaggcgaccgtgtccaccgacagagaggagttgcgacgagtccgattggaggtgcgcgggcgcgagggtttcaaggggttggaacggggtcttgcgatgggatctttgatgtcgagacagtcgggggagctcttacggtcggagccatttgggatgcgcgatttcttcagaccgtcggcaggatcgggggcccgtcgcacagagcggagggaagaccgcgacaggagggccattttggatgatgatcagttcatttgcattcagggggagtcccccgagggtttacagggatttagggatgaaatatgggcatgcgagaagttcttggcgaatgccgatggaggttgtcaaggtggtttatatggacttcttggaggcgtcaacgatatattgattctgattctcttcagagatagacaatgcattgtattcattctattgttctattcagaattaattaattcagctgttgagatatatagaatggcgcttccaatgggcacctacataggtaacactccattcttgctacaggtattatcctgagataggttctcattgttaattatctctatgttcaatgcaaaatagtcaactattcaactattcaactctcgctatcccaactatctcggaaaagggcaaacccccacgggccctcagtgtgggggacggcaattcaaccattgccaggtcggaattgtaatatttctatacatgaggggtgagaggggatattgggatattggatataagtctagtaatagacagtagcactgggcagtagacacttacaggagtagattcaggatatcagatagacaacctagatatccccagtttacccctaagaggagaggggatatactctcctatacactccaacgcatcatcgacggaaatcaaccccgcaggcgtggggggaaatgtccgaatgaaaccaaaagcagacgtgggggataagactatccagctaaatagctgtaggttcgccgatattgatccccatccctaagtgacatttggtatgcagcgaatgagtccatgaaacctacacgtcctgacagaccaatagacgacctcttctccaaaatgaccgccaccaagctaaatgccctcccccacggtgtctacgtccccaccgtagcattcttcaagcccgacgaagaagtcgacctcgcaacggtcgagaagcacgccgtctatctcgcccgcagcggggtaaccggcctagtaacccaaggcagcaatggcgaagccatccatctagaccgtgaagagcgcaaggccatcacagccgccactcgcggcgccctcaacgcagccggctacagcagcatgccagtgatcgccggcgccggcgccgcctcaacccgcgaaaccatccgcttatgccaggactccggtgcagcaggcgccgacgcggtcctggtcctcccacccagctactacaagacactcgtgagcaccgagtccatgcacgcgcacttccgcgccgtggccgatgcctcgccggtccctgtgctcatctacaacttccccgccgtgcagtccggcctcgatctcagctccgacgatatcctgacgctcgcagaacaccccaacatcatcgggtgcaagttcacgtgcggcaacacgggcaagctggctcgtgttgcggcggccaagcctgatttcttgacttttggtggctcggccgatttcacgctgcagacgctgattgccggtggggcggggattattggtggcattgctaatctgattcctcgctcgtgtgtgcgtgtgatggagttgtattgtgctgggaaggttcaggaggcgcagaaggtgcaggcggttgttgcgcgtgccgactggactgctatccaagggggctttatcgcggttaagactggtctgcaatgttaccgtgggtatggtggtcttcctcgacgaccttgtgtcgtgcctgatgcgaaggctgtggcggccattcaggaggagttccgggaagccatggagttggagaagtcgttggagacagtatagatgaattaaatcatgataccagatgctatacggatattctgttctttccagttagttcaagataatcgtaaataaacacagtgcgactgtatcatccatagctcctccccctcttttaatatcagatgaagttgcatgtgaaggttgcactgtctcctcttctttgcttctaatcatctccgtttgatgtaacaggagataactgtttgtttttccgatctcgatctccaggttgcatcaagaatgccaatgtgagatcggcaatgcagcacataaataggtctggctacctcatagccacggtctttctgtttatcatcatcactcgactcctcatcatgaagttcgcctctgtcctgactgtgctcggggccttgtcggtttccgccgtccaggtgaatccacttcccgccccccgtaacatcacctggggttcctccggtccaatccaagtcaaccacttgaatttgaacgcccatcactcctctgtggtctctcaagcttgggagcgagcatgggagactatcaccaccctgcaatgggtccccgccgctgtcgaggccccgattccctcctacccagccttcccttcgacccctgtctccaaggccaaacgcgcgccctccgcggtccacaacgtcaatgtccatgtggtggacagcgatgccgatctccaacacggcgtggatgaatcctatacactggtggtggccaagggcggcatccagatcaatgcgcagacggtatggggtgtgttgcacgcgttcaccaccctgcagcaaattgtcatctcagatggcaagggcggcttgatcattgaacagccggtcgagatcaaggatgccccgctgtacccctaccgtggcatcatggtagacaccggtcgcaacttcatcaccgttcgcaagatcttcgagcagatcgacggtatggccctgtccaagcttaatgtccttcactggcacttggacgatgcgcagtcatggcccatgcagatgagctcctaccccgagatgaccaaagatgcctactcgactcgcgaaatctacaccgagaaagacatccgccgcgtgattgcctacgcccgcgcccgaggtgtccgtgtcatccccgaggtcgacatgcccggccactctgcttcaggctggcagcaggtcgacccggagatcgtggcgtgtgccaacagctggtggtcgaatgatgtgtgggcggagcacacggcggtcgagccgaaccctggccagctcgatatcatctatcccaagacctacgaagtggtcaagaatgtgtaccacgaattgtcgcgtatcttcgacgacaacttcttccacgttggtgctgatgagatccagcctaactgctacaacttcagcactcacatcaccaagtggtttgccgaggatccttcgcgcacctacagggaccttacccagtactgggtcgaccactccatgcctatcttccgtagtgtcggtgagcaccgtcgcctcatgatgtgggaggacattttcctcgcgaccgagagcgcgcacaacgtgtccaaagacatcgtcatgcagacttggaacaacggcattgacaatatcaagaagctcacctcggccggctacgacgtggtcgtctcgtcctccgatttcctctacctcgactgcggccacggcggcgctatcaccaacgacccccgctacaacgagcagagcaacactgacggcggcgtgaccttcaactacggcggcgccggtggctcctggtgcgccccctataagacctggcagcgtatctacgactacgatttcctcacgaacctcactgccaccgaagcgaagcacgttatcggtgccgaggctcctttgtggtcggagcaaatcgacgatgtgaccatctccagcgggttctggcctcgcgccgctgctcttggtgagctcgtctggtctggtaatcgtgacgcagcgggcaaaaagcgcaccaccaaccttacccagcgtctgctgaacttccgtgaatacctggttgccaacggtgtgatggctactgctcttgtgccgaagtattgtctgcagcaccctcatgcttgcgacttttataagaaccagactataatctcttaattgctttgagttggacttagcgaacttatactgtctggtctgtatatacttggtcttctatacccaataccattggaattcttcatacagtctactatttgatatgtagttattgtaacaaccaacccacaacaccaacagctcctatacctacctcctacccaatcccaaccccaatcaggcaccaaagcctcctccagcccaaatcaaattctacccccaaccccaattctcctccatattcaccttaacccaaacaaagccaacctaaaacaaaacaaccaaaacatcacaaggccatccaccgatcagaccctcacagaaccccacagaccctctccccttcccaacccacccaactaacctccacaccaaaccaagtcaaaaccgccgtacaacctccctcttggaacttggaactcacccttcgcccccgtcccggactagatggcctcgggaggggcttgctggtgcagtatgcgtgtaggatggagtactctgtaggtataagttaggtgcaagcatgttgcatgcagtcggatatcgcatgatatcattagcattgctatgtattgatcattctacatccacatattgtatatagtatgaatctacataaatgtacacataggtacaagttcgacgtcaatgttatatacatctgtattcatacatctttccatgtatacgatccataccgcaccggaaaaaaccatccatccaagcataccataccatccatgctcaatccaaactcgaaacccagtctacggattcgattcagactgggctgggctgcgcgggggttgctcacgtgtgcacgtatatgcagatgcagaaaggaacatatgttgcacggggatttagctgggaatgacaaattgacggattggggagatataggcgagcggttggatggttattgcttgctggttggggttcgtcatacacgtggaatttggggttatttgtcatttctgggacgggggtaggaggtttgggatggatgaatggtaatgatgctgataccttcctatttgggaatgggatttgcattcttcttaccctgtatgtatctatgtatgacccggagatattcggtacatgtacatccctggcctctacgtatgtgtttatataagtatgtaccgatgcttccatttccggttcgctgtgcccgagtagatcgggaactgatctcgcatattctagttacgtgacgttgcgaaataagagtaactggttggtaagtataactcctgcttggtttggtttacggcttacgtcttacctggcgtggattgaggtgagatatatttctgtatcacagtcgtgtttcaacgtggatcggggtcttttcttcttatattcccttggcttatgtttcatgcgattgtgcggcttcgaataatgcatgtctagcatatcatatggcgttaatgactggggcgttgatggggctaggtttgaggttactcttgcaacatatatcaaaccgaatggtcgaaaatatacatcgacgtaacaaaaaacaggaattcattcgttggccatcaaatttctaaatttctaatacgtcttaatcttactctgactcctatctcatctcacctcgttaccgtttcacagcataaccccaagaaccatagtctgatcgcagcgtggaccacgaccaaatagaaggtctcgtgttgagcgataaacctggaactgtctttctgacagggctgcggagaatttgcggcattttgcatcgacagggtcatccctggtctgctggatgtgtttcattatatcccggtcggttctgacgtgcgtatgtatgtattactggtaaggcttgcaggggctgtgtcgacatttgcatggaagtccttctagaaatcgactttgttgttggacgtacatgtgttcggcatgtctatatgagtttcggcgaatgatatctcgcgattccgaatctggatatgtcaggcatgtttgagatccaaattggaagtctgtgccgaagagaatggagactatccatattgcgtactaatgccgttaatcctcaatatccgacttaggatgagttcaagaatatgggcaatccctgtaggttgcgaggtatacatcgcataaaaccacataagcagcggaccgagctcagaccgatgatcccccacacatcccacgctttacactccagtatgtactccgtagatgtgcctgcgatgtacgccacatgtcaatcccagggttatcataggagtacctgaccgcgtcaatatatctatccaatctctcgggcaaagtaaagcaccccgcagcacgccatcacccgatacatctacatctgccgagctatctgatcaccgaactatagaacctaatcccaaccgaaaacctgatcgacagcacacgatgcaggatatacacccgggtagtaggtccgaccttaccagatcgaccacttaggagttcgtcctaccacacccactccctcgcgtgtcccatcccgcgcgggctctgatcaatggaacccgggttcctatctatcgcgccttgtttttgtaattctttttttggccgggcatgcagacgacccacacgcggggatgcgaataggaaaagactgattccttttcctgtcagttacgtcggggcgcgtgacttccggatcggataaattaattgtggatgcgggtcgcatccatatgccgtgttacccagacgtcattgtagcaccgcctcactgagtggagttggggatctttgcgtcattttcggggagaggaaacacgctcccccataggctgaggagtgtggctggtgtgtggatggtgagtggctggtgatatggggtgggtgtggcttgcgtttcgcttctttcggcttgtttttgtttttcttttctgtggcgcagttgcgagtcccttggtacggtaaatacgtgtaaacagaggtaaagccacaataggcaaaagaaaaatactgtgtagtggagatccgatccacatagttgtcgctagtgaattttcaatctaaatcgcagttcgcttcgctttttgctcgggatcggcacgccaagtcagatccaaggtgacagagcaaaatgggtggaggtgtgatatcaatatcgtcaatcgggatttggcacggaattgatctctagttcccgagatcccgtgcaggtcgatcatcagtgtaggaatatgtatcaggatgatttcatgatgcatgcgccgaccgtatacagcacgagcctctttcctattcggtcgtgtcaaatttgacaggacttgattagcgtactgtggcttgactagtcctttcgcgcctcgctttcatctacaatatattgtctatcacccgcgatgcccgggcggaagagtggctccaggtacagaaatgaacagcgcatgtccgtcatgcaggaagatcaccgcgggaccccccagtaattgaagacactatcaatctatctcgacttgctacacttcccaaatgcatctgcctcggctacagtggcacagtgtaactccttgctcgagtttatcacggggctgagtccacatttcccgctttggtcggctgtgacacacccagatatcagatcagatgatgcgatccagctccaatctaaagaaccaccccatattgagtccgtgggcagatcatccagtccatggaaattcaaaccgaggggcgtggcagatatcgtatgaccgagaagtgattggactaccgcgtacgatgcacatacaacgcaactgcaagataacaaagggccagattatttgatctacgctatcaaatactggaaactagttcccaggccctgaatcagggccggtgagtagctgactctagattctactgggattaatagcttcccctctctgaaagttaatcttgcattgctcgtgtcggagtggcaaacggggtgattgggtgagttttacccctctcgggtgaacaccccagaaacagaatccatgaacacgtagatcagagcccgggtgaactactgatctggcatttggagacgagcaatgaatcaggataaggtatgtaggacgaatgacttcaatgtaagagcaagagcaagagctagagccgcacttttccgtatggaactgataaatcaagaattcacgcggaactcacgcgagcagttactgagattaaggacacccctgtcctactcgcatttaaccttatttagcaatatgccaagcatcctaattagggacatatacctagtacactctaggtaaactaccgacggtacctaggtaagtgtatttgcatttaccctttacatacttcctaaatgaatgatatagtcccacatggactgatctgtcccaaccacatggaaccgtggagaggatcggaccgcgttcatggtactgcagcttacctttccttgcctatgaatgaaccaatagaatactttcgctatggtgtcccacggtggtaagacaggcaaggatatccccttcaagaaataagatatgtgcaaactgtatcacagagtagtttcattcttatgcaggggctcgcttatgaaccttgtcgccctattttgcaggtgcataggtagattatcacataggaaaagagatcaggaccagttaccgtttacatgcacgaggttggcataatgatatatcatcttttcactcccaatgtcttgatagagatgatctactgacaccaacatgtatccgtcccaatggggagcgtggacacgctccacccaccctccgatccacgtccacctgcattacataggcgagtccagtcagatcgcaggaagtagctgccgggcagttcactcgtgcatcctagtgcctatacgaggcttggaggcttggggcggccccgctttcctatttgacgagatgaccggacaacgcacaacgcacaacgcaggatagtgtcaggggaaatggggctcctcgtgcgctggcctccactctgatatctccacttagcttaaggacaagctggggtgatgttggtgctagtatgatagtgattccggcgcggggaggttagttttgatgaggctgtatttcaggcacgggaagacgagcatgtggatatgacagatctgaagcagtcgttgggtcgaaggattctgaaggagcgtgtataggtctagatcttgggatcgtcggcgtcgctgttggaagctgcatttactattacattgttatgcttggaagtactggatctaggcccgacgaaggatcacaggagtagattgaatttgaaaattgggaaatcaatggcattgttgtgtattgttttgatcgggtagggtacggtcgaggctattctgttgtgtaacttagaagctttctgctattatagaagccttattatgtagacagggcttaccctgtatataataagtgtgctaatttcgtcgcgcgcggttgagagacacaaatatcgcttcttgaaacggctaagtcccggccgaatgagctatccgactcgattgatattatgttaaagttggtaattggaattggaaatgtcaagcgtgcattggacggtcggtaggaattgctgtctttggccgtataacagcgctaaatgacagatggggctggttgtacgggcgtcggaagaagatacagaaataagctacgaagcgcttattataaccccaaaggagtcagtaatatttggggtctgaaatatccacaatatagcattataatcaattgaggaaggaggataggaataagcgtggatgtggtatggcaagttcagagttcgtacgactcggcggactaaaggaaccatgaaccatgaaccatgtcgaccagtttcccaactctagagatagatgtaaccatctggatctttagtctagtctagtccttatccctacaccagactgggttgtcgatgcatacaatattgtcgacgttgatcttctccccctccggctgtttcacttctgtttttagaaacaccacgcgcttgacagggattaaacgttcccccaccccatgtgctcggtcctcctatagggtttagggccatacaactccgaatagcataagaggctcaatgttgggatcggcggttgttttcagcgtacagcgtaaaatatagatgaggattttcggtttttgtttttactacgtgtgggatgtctcgcatcgaagttggtttattcgcggactttattttatttcggtaataccgcaaaactggaggaatacgaaggtctggggatggaatttgccactctggagaccgtcgctggccccagggtgatccgagcacgaatgacatcaaagtaaatattgtcgttcgaagtataatataacgttatagacgaaagttgaaagttccatggttctatctgagtcaaccgtggacagacagtactcggactagattgtcttgttttgatatttccaagttggcaccgatttcccgtattgggtatctctttccgacattttgggaggaccgcgttaaggctaggctaactaagagcctcttgatcgtcgtatttttaatctggatatgcaagtccataggaagtctcggggtcgccggatcggcctcccttcggcatataaattatctcagtaactagttggggccaataatataccattaataatctctacgcagtcggatctctggcccgacgccgggatgacagatgagtggagaatcattctatcctcaaacgatagaagagcctagaatgtcagattcaaatgcttgagttacgtttcagcgtttcagtgaaatggaaatatccaccatgttgggggccaaaagtgtgagagcgagagcgagttcagggccattgggtccagtagatacctcgatctcacgcatgaaggagcgataatctcagtcaatgggtacttcttggtactgactggctaatgcgcctgaggacgttttaggtatatgtttgacatggacgttgaaatcagtctaacagttatagttacatactatgcatatgatatatctttgaataacaatcaaagaattatggctaatagtaagcgtctgcacctaacccattgcccgggtatgtacatgtgtcaagtgcaaggcaaatgcacgtatgttatgttgtatgccgaccgcagtgtaggctaagcaaggcaaagaatcggtcaaatcaacacaggccagatatgacttcattactccagtctcgcatcaaaatttagactgtgcatatgactaagggtggataggatagccccattaaaaaaggggatgttaccaccgggatcgccgataaatacaacatacgaactccccgccagcgctgtaatttatccagctgcgcctcaattcagggatgtggatcgactgccccatgttgtttggctacggacgaatcgcatgaacgccttcgctcgcttatgattgggactcactcacgccggtctgttgtggcttgggcatatgtggcgctagttggctttagtgcatcggcccctaacacggacactccgagtgacagctcgcactgttatcccttgggctagctagggctatggcgtaattagtgtagatgatctggatctagatgatctaagatgctgtcatcggaaatgcggagagtagggccgagattgggttccttcgtcttgtatatcaccatggtggtgttcggtatataataaacccagggatcttgatggattgagggattggatcgtacagattaacctgcatccgaatctcggactgaaaaatgggaaatgtcactatatcaccgtgcatccgagaaaatattaattgaggttctttccattttgggtagacccaccattgggttcttcggatatgcaacctggtgatcagatcatcaaggggtgtacagatcatctatacatataaacccatgccgtcgacagattgacactacagtactcaaggaggtgacacctagttagttacttcctccaggttaatgacgtaaaaggcaaccaggggaccttggaagcaggccacatcgcgatcaccaaagaatgcggctcttgaacggcagcctcggaaatcagaggacaacacacactgtaggatcgcctttcgtgattaccgagaaggactagtgggcgggactgatacgaactcacccgacgctaaggaagcccaccgagccctcggagagcctttcagatgtctgattggagagaatttagcaagccctcattttcctgttcgttgggttggcacatatggaccaatcacccttccgggcacgcggtcggcctgccaagttatggaggagatggggccccgtcacggatcgaccgaacttatgggatccgattgtatttgtacaagtatgtgtacaacataactatgtgttcttctaacatgccttatattccccttccttctcatagaaaaggagaaggcaccagatctgagtctattgcattgtctgcttatcttagtttatctgaaaagaattccgtccgctctttctctgggtcagattttggtgcaaaagagtggaacgggtacggagtctgactctgactgccgagatacgaagtatggagtagaggatagacagatgtagatccactgatccattgcatggaagctaggtcaaaagtagtctaggcctatatacaatgtcgaagagaggttaaaaatgtatttttggggaaaaggggccatggcgccaagcctcggggcagctctactttgcagaacggagatgccgatgacgacagggtaaacgattaatcatataggtaacatttgagtatataggtggctcctagaacccgaggtggctcttggtgcaacggtcaactttctgacaggagcttctcctatcgtcaaaagtataatttgaagaggactactccgtcgcagctgtgctcgatgcgccatcgatcggtttccacgaacccgatggacgatcgcctcggtgaaagtacttttgaaaaactaatattccggagataattatggagataattccgggataaatactccgtattcggggatatattcggggatcatatgtaccccgtagggcagagtgaggcaagagtggataaagccagacgagctgtcagaacccagaaggtactaaccatgcggagacagtgggttatattgactgttgacagcatagacatgcctgacgaaggctgagcttatggcgtagatatatgggtaccgtgcagctgtacggagtagaaaatagagtgtacacaagcagaaggtaagagcacatgactagttaattaacagcgattactcatccgattaagcctaataacccgaaggaggggccctaagtttccctgtctgttcacagccacgttcaaccggttcgtgccagagatacagtatgtaatggtatgtaatggttactggattattatttatttatttgatatttgctttttactatgtgaagtgttttttatgattttcatttcatttcattttttatttcaattccattttccttttattttcactttttaaataaaatataattatagacaagactataactaactactgtagggcgggcccatcgtcaccatttaacaatctcctcgacatctataatatcctcttctcccctccggtacgaatttaaatcattgactcaatccagcgcatccctcgaccacttccgggtacgcttgtttaaccttcttcgcctcctttgtcgatcttgcctcgctacccgcgtctgtggagttgcaacttgctgtgacctccctgccttgcgatatcataatcgacctccttacctccgtgcataagaatccgattctctctgtcaattgcgcacgttgcctcttcgtggctggcgtgtttggttagccgagcgggccgcgatcttacccaggaaccttatcaccggtatgtccatgcgtcgcaacggaaaatcttgagacagcatgtactgaccagctggctatgttaggatcgccctcgcgcattgcattctcaatcaaggagatgaccacttttgaatccaaccctgatttcaccctctttcccttccacgcccgatccaagatgatggctgtcgaagctgcccggccgaaacagctatacttcgatcccatgatggatccttccatgttctcctttcccctggagagtctccccaactacgcacacggccacggccacgatatgcccagtgcttccaattcctactacgatacccaccctctgctggagtctgcagatctgcacaatcctacatatttctcttctgtaccagccacaccgccttcggtctccgcgtctcactccgcagagccatatatttccaccgggtctgcctccgggcagtccattgcgagcgcatcttcttcggcgatgggatcgccatactcgggaacggcgcaggtatttcaggagaattgggtgaatacgaaccacggattgggtctaccagccgcagtcatggacgaccttttctcgcaggaatacatgggaagtatgttggacatggatatgccctatcaagaaaaattcccggacccttttgtcggtacgtgttgatatcaatcgcaaaccgtctggtgtactaacaatgcattcagatccctcattgatacaaccgacgcaacaagggcctggaattaccccgactatctcataccccgaccaacccacctcttcctactcaaacgtgcaaccgaactacatctcccactctcccgcaccttcacctctctcatataatgatctcgcagagcaccactcacccgcaatgcagcacaatgggctatctcccctcatggtcccgcacaggtcgcattcacgaccgctctctatctatgaccgacggtcgtctatttcctcgattcattcccgacgctcgcaacacagcccggcgctgagcagcatcgaaccggacgaagaaattaaggagaaagggcgctgcccacaccccgactgtggtcgcgtcttcaaagatctgaaagcccatatgttgacgcaccagtcagagcgacccgagaagtgcccgattatgaactgcgagtaccacatcaagggtttcgcgcgcaagtacgacaaaaaccgccacaccctgacccactacaaaggaacaatggtatgcggcttctgcccgggatccggctcccccgcggagaagagcttcaaccgcgcggacgtcttcaagcgccacctgacctccgtccacggcgtggaacagaccccgccgaactgccggaagcgcagccccggactaaagaagggcaccaactatagccccgacgcgacaggaaaatgttcaacctgctcagcgaccttcagcaacgcgcaggacttctacgagcatctggacgactgtgtcctccgcgtcgtacaacaagaagagccctccgaggcgatcaaccagcagcgcctcgcagaggtcgcgtcagacgaggaggtgaagaagaccatggagaagcaccaactcctcgacgtgcccggcccggtcgagcaattcgacgattacgaagaccaagaagacgacgatacccaagatcccgccagctggcgcggcctcaagacgaaacccagatcctcgaagagcaacatcccggcctcgcgcccgattatcggctccggaaatgcagtctccaagaatgtctccaagcccgcccgcgctgtcgtaacccgccgtcgcaacaaccgcggcaactacccccagtcctggggctgtcccagcagcaccatgaagacgaagaagcgcgtgctgtgtgtttttgatggccagcgccgtctgtggaaagacgagatgatgctcaataacgagttcgaggtccgtctgagactgctcggcggtgcgggcgatggcaccaaccgggatgcctacgttaccgatctggacgtcgagacgatgaagcgcgctgagggtgtgctcagtgccacagaggaggagcgtggtccttggttgaacggtccttcgccttacattatgggccggccggcgatgctattgccggaactgtctcatgatgacgagctttcgctcaatgaattaatggcttaaacgactttcttttgtcttttctcctactccttactctctaccttttgagacctttcgtgtatttctttcatgtctcatgtttccgtacagcagtggcgtcttgacgagcgatttgtctgattacggattatggatgataccttgggactgacacttaatgactttcgttctttgttttctgtttctgtttctgtccaggctggtctcgtggcttcatgcctgatcccgctggcgggattcgtaccaagacactattaattggggactaggaatgagtgtctgaattgaaaacaaaaaacattccatcttcaaatgtcttgaattctcagcaagtgtaggtctgaagtagaaaagatataagaatgccatagacccccacctaccgatcttcacccccatgttctgccatcttccccggtgtttaccccatccaacctccacgatgcaattgggactctcagaacatctgtccactctggtcgcaagacgttttacagctgcccgagatagcggccatctcgtcttctcctcaacccatctgtccatcatcaatgccgcaggaatatcagtgagtgacgctaagacccgaccacgacggttctaacctgcatccagtaccaactccgctactgcccggccctcgcaaagaaaccctccaatctcaaggacaatggcccgaaaacgccaaagttcgatccctttcagaacccatgtccggagcttctgatcgcccagttcccgcccgagaaccccgcctacaacctcatcatcaacaaattccccgtcatcccgaaccacttcctcctcgtgacaaaagactggcaggcgcagacggacatcctcgacaaggctgacctagaggctacatacgaggttctgaaagcctggaacaccgacagcgatggctccaactccaacagctcgaagagcctcttcgccttcttcaactccggcgacgacagcggcgcaagccaagcccaccgccacctccaattcctccccgtcgaagcaatgcgccagccaggctcggactcctggtccccactgatcgacctcctcacgcaacaaaccccccaaccaacctccccctcccaaacaccaacacccaacttccagcacctccccggcctccccatcgcgcacttcgccctcccaatcccaccaaacccctccgccgaaatcctgcacgacatatacataaccctctaccgggccgccgcggcagcgacgcgcggacgaacaccgagccaggacaccgagtcgctgcccacacacggacgagcgtgcataagctacaacctggccatgacgcgctcgacgatgatgatctgtccgcgcagacaggagacggcgactgtccccgtcgacgctgacagtgtcgctgcgcgcgagatcgcggaccacggcgtgctctcgctgaatggcactatcctggctgcgacgctgatggttaaggccgagggcgagtgggatgctttgcgggagaatccggagcatctgacgcaggtgcttgctacgattgggtatccgcagacggattctcggggttcgtcgctttgagggtttgctgggagtatatagctacgatgggtagactacttgcatgctagaattgaatacccaatggaattgctgatttatagcttgaattgatgcttgtgtttctcctatctatgagagattgaaataattatgtcatgattgcttaatagaagatacttttctatatgctgtatctacttggagcgaggttgagggaagaacctatatgtagcagaacaagatagagaaaggcctatcagaacgtgctgggaagcaacaatgttagccataggaatgacaggccctcctaaggtgtttcttctatctgtttatcaacagacttggaagaccaacacagggagccaacacggaaattaaaacaaggccaataccaaagccaccgtaattcagagacatgtttcctttattcggatgtatctagaaagaaggaaagggaccattagacatgcagtgcagagccatgtgccagactcatgtaggaaaaagcgaacggtgagattcattttctcagttctcgctttatgagtggatggcatgaactgcagatgagattgtttacaagccacgagccatgatgtgaaacaagggcagaagccgggcgcataagcagaagctaagaagacaaacccttgcctatataggaagctgggaatgtcacacgtaatagcggaagccacagttacctgtcaactgatcgtagaagaattcgagttcgaagagtgagcggatgttgctacaaataagcctgatagccaagctttcaggcgatatagctttctccacagtcttttcgggatacatccgattgaaaaggtcatcataccgatgtaaatcataggcatagaacaacattgcgccttatcgggaagctcgggatgtcactcatattctgcagcctaatggccactgaggctcgagctattaggttgctagcgtgcatcgtgcgaggaggcgtcgatttcattggctgtcttgttcatcctggcgtaaacgtgctggatgggatggttaagatgcttctgtggtcaaaagaagacctggcaaagaagagagtaagtcttgtacatgtctttccgtggaaggcagtgctcgtgctagaagccagcggtgagtcgctatcacttgcagcgacggcgatggtatgtgacgaccacaacttcgacaatcggtccgggatctagtcaaagaagctatagtcactaggcctaattgagatcccgtactttcacatgataaatctgcatggtgggttgatattagcggccatatttctatgtttacttctttctagtcattatctaactacagttgagtattctggtggtaatccattcccaatcagacttcacaagaaaccaaacacttgcccagacacaaagcgaaccacttgcctgccaagttgcatggcaccaatagaccggatgactccaaggaagctcactacgagctaaccagggggctgtgaccgggcgcaaagcatgtgatctgtataaatccgtcttgattggccaaacttggctctaatttccgttggcctcctttattggcagcctggacgcttttgcacgcttttgctaggccgtttatggtgttatagcctcacattgcccttgatctgcccgtgttctcgtataggattggaccccacacttgactccatcgacatttaagaagacgccttgcgctcgttgatcagattcttcctttaccatcgaactacggacggaatattcaccatggaaaacaacaaagaatcaacagtggctattacaccggttgctgccgtcgaaccaacaccaacaccaacgccagatactacagtcgaaccaaccgcaactacaacaagatcattgccggtagccgacccaatggcgatcatacccgcgcagagtggacctcccccacaatacgatgagtatgcatctcggtctaagaaaacatcccaagctaacaaaaccagacaccagaaagacgcaatcacagcacctgcaccggcagcgacattaccacaaaccaacgagaaagccgtcccaaccggcctacaagttccagtcgcccacagcgttatcccactagcccaagttggtgaaaagcccgcatggatctgttgtcccttttgcttccacgaggtccaaaccatagtgaacaaggagagcactagcgccacaacgtgagtaggtctatccccgcttcaccttggtctcacttctaacgatcctatctctcactttagtatggccgcagtgtgctgttgtatcttcggcggaatctgctgtgcatgtctaccattctgcatggagctgtgtcatgactcgcatcatttctgtccaaattgcggcgcgaaggttgctatacatccgcatgaagatgaatgcgaagtacagacgtttggaccggactcccctcaggcgattattcaagcgccggggttcattcagcctccgcaggcggttatgaagaactagggtgacgatgtacatgttgaggagtgacggagaaggaatggactgctttgcttgatacctttgtttactctgagacccgcgttactttactattattaatgaaagataagtcgagatgaagcatttgaattttatcatgccctgacgcagttaactgggaccagacatgaagaaactactaggtcgcttaatatctctaactactcttagattgacgttactttactcttaatgaagaaattgtgaacaagcatttgaattcattcatacctgacccatgcaagatggaccagccaccttacacaggtcagggcccgggacctaacaccacgaccccctcaggggatcaccccatcggcattgggcatggtgccaatcagccgctggaacaggtcagccagcatggcagccccgagggggtcgtggaagttgcgaatgaccctcgcaaactcaatcttggtctcccagatgtgtgtgctgagagcctcgattgcctcgcaatcgagcgggatggtgtttgccaggacggcacgacggtcgatgctgtccttgaggttgatgatgccaacctcgaaggcgtgacggtaggggtcccagggggccaccaaggccgcaccggagtgctggctcatgctgtgtaggaaggaaggttagcatgttgtcaattggggtaatatatagggtgagacggtcacgtgtctcattggtttgtttgcataccttgcggtggagataccggtgggaggagtatgaaggatgtgggtgggcgtggtgttatactacacacgtttaatgagatggaagcaggattgggatggttggagatgcagttgtgatgatgcagtgcgataggattgatggaacacacggacgtaagaacgaaagaagtttttcacaagatcgagaaataaatagtcacaccattgccttaagcttaaccgcgacatgggtcggcgtcgagcagagggtccggaacatactacaggctcggcgttgagtagaacgtcgaggaggaaggtgataatgaacaatgatgacattcagatcaaacactatagctttgagcctgtcgctttggcgactaggtgcgcattgacaggcgtaacagcctttccagtttgatagaaagcagtaatattctccatacccaacctctcaaatccgatatgtgagtccactgaagcaccggcattgtgcgacatcatctcaacattcttcatgcttgcaagctccgggctgacgcgcggctcattgtagtgcacatccaagcccgcagcagcaagcttaccactcttcagtgcgtcaacaagggcactctcatcgagcaacttgccacgggcgatattaatcagtcgcgagccgtccttcatctttgccagcagagatgcattgaggagtgtctccccgctaaacggcgttgcaaccatgacacagtctgaaacagcaaggagactgtccatggtcttatggtatgttgccttcgagacggcttccagctgtgcgggcatctgcacgatgtcgtaatagtgaatcttcatgttcaaggctaggaacgccttctcggcagtgcgccggccgatctggccgaagccaatgattccaagtgtgtgtccattggggttgtgtgagaccatcgccaggttgcggtttgcatcgacaaatgcatcgacatccagtgcgcgtgcggcaatgtgtgaccaagagaacaggcggaatgtggagattatgagccagattgcggcgtcggcgacggattctgtgcatgctgcagcagcattgcagtaaaccacccctataaaatgaagctgttagctatttctcctatatgcagcttcccgatcgctttgttgtatacacacccttcttcgccaaagctgcggtatcaacccagtcaaatccagcacctgcactggcgtagaccttgcaagagtctggtagcagtgagatgagctcctcatcccagttccccatctcgccgccggtattccagaatgggcggtagatggcgaagaaatcgccgaattggcgctctttcagggctcggataaactccggccgagacatgctgtaggaccggcggatctcgaagacatcttggaacttgctgtattggtcgtgattccagcggatgtcatcaccgagatggaggacaattggtttggtcattttggatggattttgggttgtatagatcggatcggaggttggaatagggttgggggtatttggtgaggtcaataagaaactagtacatggaaaattgtaaaacttttatcaaaatctcattttctaagctggcaatgtggaattagttaaatatctcttttccgattgtcttgatgtttgttgcggctattgctattctacgccacggctattgagcgggtatcgatctcccggctaatgaaatccgacaccaaccaccgaggtaattattcaagtctaatgaaaggccaaggagaggtaagatggttgtttttcaatggagatgaatatggaagatggccctgattccgagcccattcttcttcgctctgctgggggagttttgctttcattagtggaagcacattctccagtgtccctttaattcggttgtaacgagcatgtcgagactttctgcgtgaattgtgacggcttggtaaaggagttggatctataagaaggattctgtcagtctatatttcatagaagaatggaagaacagtttcataaatgcagcaaatcatgaaaagggaatagaattggacaacaggggcttttttggaagattttaaatcttcctgattggcccttatcataaggacatgaggatgcaaagggtaatccacgtaaagcaagatgaacagaagacatgagcaagaaggaaatgacattgtcgacatgaggcaggcaccttgaagggagataaaacagcaagacgtaccgggtagtgtcatccttgacctcgaattattcgcaagatcgagaggattcatcgctcaatccaggcagagactgtctcgttgagcattgtgtgccacgcagttgtagacatacatctcgtctctgggtaacagaagccttgggtgagtctgcagtttggttatctgtttccccatcccttgagagtatattggagaaaggacctagaacagcaaggtaaggcgaataagaataggataaaatcccttcatcactgcagtgctttatagcttgtaaagaggtggtagagggaggataggagaaagtgaaatcgagtagacgaacgttctcaatagtggctagagacttgacctgaatgctttgatgaacttatcgtaagtttcgagatgttcggtcgcacatctcgatcttctgccattcttgtgttggtatcggggcatctgtccatggatcgagaactttatgattggagacatcgacaaagtcataaagttgcttatgggaatactcgttgtggaagaagaccttccagatttctgcgtgaggagatcgatcatgtcctaatccctaatgacagtaacatctaatatgatcctccattcgcccagatgtgctcagacaccttcctccatgacaggtggcagggttttgactgggtcggtcgaaacaagctacagcgcactacagtgatgagaggatcatcgactgcaagtgccgtggatgaggatagtttgactagtgatataaataagagcattaaatagtaatttggcatttaatgcttaaaattgtgtattacctcttattcttatcaggcaaatataagtcattatgtagggtatctgatactctttaacattcgtctcacttgtctatcacccagagtatcatcaagttgctcattttgactcttttcctatcattttccataattttcatgttttactttggcactctcaccttttaattatactctttctatttgaccttaccaactccctcctcttccgattttataaaaatcactctttattcatacaacatatcccttggatttctttaacttcctacatccacgaatcctgccaaaggctgacaattaagacccttttgactgacttcactgctctgatactccaaaccctctgacccatccagcctcaactatgcagtgccatttaactgagatggcgaaatcaacctcacataccaccacctcctcctcttcctacaccgacaccgagtcctccatctcggccggaaattatgatccctccgaatccctccgaatccatctgactctcattttactggtggtcatgctcagatattctggacaacaacctgaacggagagcgtgacaaatttggactgaggattgaagacgccatatgaaggataatctcacaagagacattctcctcgagacattcctgctttatctcgaaccgacaaatgctccgtgatactcgcttcacttctggcacgtcttgccactagagtttgaaaggtttccttattcagagacgacagggaaaacaattagcgctagaaaggcggcaaggtccaatcttgcattgcttctcacttttgaccttatggtgatggctgtacatgatgcttgatacttgtttacagcccaaaatcatgccacaccccctcctcaatccgaggttgagtgagcggattctgtgcaagtagatcccaatgaaaatatgtacattgtaatgtactcttaattacatatagcagtgagttggccaacgaagatgcaaacgattacagccaagtcgaccgcagactggtatgcgcttgaccaacccccacgagatgcaatgtggctaagcaaagttgcagattcacttggtctgccgaggccagatctcacggtcatattcacggataacatcaactctcagctgctacttacaaagaagggtggcaaatcagccacaaggtggttggcgctaagatacttcttggtcaaggatgcagttgcccaagggcacgtaaatatccttagagtcgacaccaaacagaatctggctgatggatttaccaaggcgcttgcgatggagcaattccaaaacttcgtgagactgctcggtatagcttgaaccaccaaggaaagttcaaattttttcaaccattgcagtacggcatgtcatcatcaacaattctacatcaatcaagggtgaatgtgagatctgtaagggggatgttgggtatccagtaaggctgacaccagctagacgtcattaataaaacatttcactccaatatacagaaaggcaaccaagcggaaaataatacagaggaacgctacagcacagagactcagaccagctgaatacaaatataacaaacagtgcacacgcgctcgccaagatacattacatatcgaagaaaagaaacaaactgaggataaatggattaaagaacataagaacaaaagaacccgcgtttaaccttaagccaacctcgggtcagatggtgatgtcgtgaatctcgcaccacttcttcttgcatgtggcattgccaaaatggtaggatcccccattcgcccatatgtgatcagaaaccttcttccatgatacctttggtggctcgttcacggtcaacccggaattgggcagcgagttgtaagtgtcatggcgctctgcgtgaattgcgacagcttggcaaaggagtcgcatctataataatagatcatgtcagtctatattatcatagaataatggaagaacagttcacaactcacatctcgatcatgccatgcgggctttcgcactcgctggtctttcgacttggtgagagtgcggtatcggcctcgtagcgtagactccgcctccttgaacccgcccaatcgcttgatttccttgtatgatagccctcggctcttgcagtctatgagaaatgcatttctctcataaatgtcctgcaccgtagcttcggtcccgccttgttcttcttcgctctgctggcgggaccgtccttcggtggttgagacggagaaggatggactgaagctgcttgctgggttctggtccggggattcgtattctgtgtcggagacaggtggctgtgttggagcgtctcgatgcagtccaggttgatactcgggaccattggtgatttggtagggtccagaatcttgcaaatgggaaatgtagcctatgggactattcgggcccaaagacagaggcgcaggcccaaaagcctccatgggcagtccattccttggctcgggttcattgtattcggctgggtagttgtatgtattggtggccggccaaggtaaattgtaaccatcctgtgtatgccagctgtcttctggtgggctagtgaggtcaggcgtgggataccaagcctcagttgtgctgggtggttgagagataagccattggatacttccaccatagttcagcggctttgtgtcctgaggagtgatggatgagtggggatcgacctgtcttcccgtggggtagttggcgagagtcgggttctggcagttgaattgggtggtggaaaaagcctgctcgtccattttgacatctgggatttcaaaggaggaaagaggaggtgtttccccagtgcccaaaaggaaggaattgctagccattgtgaacattttgccctgtggtgctgggtgagcaagcccagtgtgtgtttcaacattgcgtgtggtgaatggctcgtcaaagtgctcaagtgattcaagatcagattcacagtaagtgcttccgttgcttgaattcgcactgttgaggtctagccgagtcgtgaaaggagacgcgccctgcgaatacacagccatgtgaggatcttccacatggagaggcatgtagcgcttgtcctccgcaagaggtatcgagtttcctggcaaactattgcgattcatcatggttttagcaagctttcgcggacgacgttgtgtttggattgttggagggtgatgtagcaattgaaagttcagagaggaagttgatgtggagggggaaaagatcgaataccagtcggtaggggaggaggaaagctgtttatcataatcgccaaatgccgaagagtaagtatactccttcgggtatgccatccatgggtctagcaccccaggaatagccagcacgtctgccatgtcgaccatagatggagaaaattgaaaataaaaagattaaaaggattcagaagagtattgcccagttttagacggttattgtcttccacgcttcaccgcaattgctggcgaatgttgtacacgggttgtcactgggtgtggacgaccgctatcccgaagatttcctctttgtcagtacacaccggatagtgtggagaaatcgaggagacctgcaggtttgaccgttatggaggttagtgcttttttatatatggagaggtttcaccagaacggtaagaactgattgggcatcacttaccgtatggatataatagccaccgtagactgctagaaggcgatgtcacgagtgaaaagtagggcaaaatttcttcttgtgaccttgatgagcagacaaaagcctctagtggctctcaagagtagctatacttcgaaaggggacggctgttcggcttgagagatcaatatgggtaaggatcagggtgtaggtcgagccgttggatgcaatgcagtctcaggtatatcggcaatgaccttaggagaaaggaggtgaagctccagattgctgtagggttatatctcaggtagattgccaacacggagagattgtttgagagacagtataaaagttggaagtcgaggatgagggatggaattgataaggtttatatatcaatttacgaggagatacagcaaggctagggagcgatattttccgggtcttttaatagacagaatgaatggatctaaccagtgtacatgaaccatgtctatcatccgccagctcatttcgacttctcggcccgtttaatctcagctgaggcccgtgcaattactagatgagcaagaggactgtcggtatgttctaggcatgtaggagacggagagaaacaaagagaaatatagacatgggttggtctcaagacttctgaaccctagccaggtcaaaaatctcaggtatgtaaatcagctggacccccgtcgtaaccgtgatccacttgccgaacgtttcagatctttcctctattgtctagcgtcatgtcttgatttagcctcgatactgtcggaggggaatgaatgtctaggaaatatgtgaaacgggagcgaagagtgaacgggttgtattctcgacggcttcctgaagaagatcttcactcccggccgttaggcccaagttaatatattcccgtcaatatttgtttttctttgccctcgatatctacattttatcccatcctgagggttgggtgaattggccccggaactgcagcccgttggcaacggtcctagcattgctgatctccaccatgtacaaccctaaatagagctgctatgcccgtctgtgggtctacctgattgacaaaccgtctaaagctccatgatttggcggtggctcggccagttttggaatgttccatcctgaccgggtagccacagagagcttctggggaagcctaagtggcatccgggccaatcagatcaaggggcccagtccaacctgcttgagaaaaagcaatgtaaacaccatagcggtagaagcaatttcctggttggagctggttggacaggaacttgccgactgacgtgagctatctagtctttgaggctctatcgcccaatactaatgccaacatgagttcatcgggccttacgaaatgcagtgttaaagatcgacaagatcctagccagaatattttctgttgggatttggaatatagtaaagctataattaggtgcattgaactttcaaagcaaaatatgtcattagcttccacgattgccgagagaatacaactaacacggtgaacttaacaaaagaactcccgagccccttttccccggatctccactgtctatagacggacctattcaaaagaagcttctttaacgaccgctggggtggcctaggtggcgttgaaaccgaagggatcaaaaacgagcctgcagcagcacgaacgcgtaaagattccgtccggtcccctagctaggggaagacctcagctcctgattctgtgggaaagccccgagggaatttctttctttgaggcaatgtttctgttagtgttacagcttcgcagagttaccgcggaggtaggtttgggatttatctagtttccaggttgcaggtgctcgatcgagcgctaggcttcatttcccgcatatgcggatcatatttatggatcttattattattccataaataccattacccgatgatttatcctatgagacagcatcaagatccgtaatatccggaacaaatctggggaaggggatggaaaagacaggacggtgagttgtgttgacacgaacagtggagggatgatcagcggagaaccaaaacaagccggaaagaacctatcaaaaaagcaaaaagaggttggtgctatctaatttaaaagggatctctcggcagcctgttggttgcccgttcgttgtcttttgggtattgattggttgaattagggcttcagggatcccagataccggggtggtgggtaggtactttagcgtgccttagtgtagtttatctctgatttttggcactaaaaatgccaagtagatcaacaggttgaggtgcattagctgctttgctaaaaacagaaacaaagcctacaacttacgataatttggaaatgtgacgtagaggctgggagattcttgttcaagactcggcttcttcctaacagggaaagccttgcttgtcgtagaccaggaattggaatttctgattgagacataagactcaattccgagtttggagcaacatccagccgactgcatttcaggtggcttgctggcatgtagctatgcactgtggcggttaatgcgctaacaactcccactgaaaaagatattgtgacacaatgttaggttttgtttcattatattttacctcccaccaaaggtttcgggaagtaggagatttcgaattatagctcctagagctggtagtacttcttcatcttccatggggtgccggggagatgcttctcatggatccggacttgagcgggggacaagcttatcagttcccctagtttcctgctctcaatagggaaaatagttgtttagtatagactttcataaggagcacgcaatataagcccagcccggtagaatgcaacgcaggggaaaatgccacacaaagacatcgaggcaatcgcaatagtagaacatgttatctacttgactaagcacccctgtagagcttatgatataagatttgccggtaggaaatgccataaagaaggaattagtgacggccatccccggcgcagaggccagacgtttgaactccccgtcgtgttcccgcttccgtcggccagctgcgtcgttccgggacattaaccagtcaaagagtcggtcaataaggagtagattgagtgaaatgagccggttcgcagccctagtcgaagtgtacagtatcttcggggaggtcatgaaagtgcgacggtgtaggtcgatgggaaattatcttgtttcaattgttgatagatcagttagaccgaatgaaggatatcaacagttgatagaaatgaagaatatctatgcacacatagacacaaccgatatatgttcggaagctggtgtatgctaagcaaaatgatctctcggttcttttttagctagaactaggaagcagctgagaagtcaagatgaaatgcattcacggaaataagccctgatgttgctagttcagtcctgtagcatccttaaaatagcgtatagttctaacttctaaacacttgcgagaatctgcgacctctttaagaatagaataagagagacgtgagattcatgaagtcaccccttaccctggtttttgaagaaggcgcaaccctaggatatataagatcgcaaatatcacaatgatttcgaagaatgataacagcgcttacactcttcggctgtctccagcagtcggagtagtaaccaacacccctgtattttgaaatttataattagaaacgaagctaagtagcccatcctacgttttatatatcaacgaaatagaagcggtacatgttgggctgcttattgttcatagttctgtttcaatttagggtttactgtcggacatgttattatgttattacatgttcctaaaaccgagagttaagcaattctaatggcaatagcatcctgacttggagcagtctctgagtacatttccttttcctctttttggaaaggtagagggaacgaggccgcacgccacatagaacagcgtgtataatcttctaatatcttaagaaaataagtatgaaacctagccaatccatgcatggtcggggcaccgacgcggtctaaatactcgcgtcaatagtttgaccaagtcatattgatatcgtgaaattcacatggggtacatgccaattcaagccagttcgtggcgacgtacttcgtaatccgtgaacttacgggaatttctagactcatggtatcatctaggctttcatcgaactgcataattcctatttttccctgaagcattgctcgtagtccttgaccaattcggctccgatgccggatgtgctaagttttcggaccccgtataggatggcgatcaccgtacacataggagcacaattcctgtagctctagaaccttagccgaaatcttcccatagaaggtgggaatatagaattcagatactatgcccgagattggccgtacattgggtcttgatctatactatatatcagaagagggggtctgaacgcgtaaatagacttcgctaagaagataatgggtgtttctgcggatactggggtgttaaaatagaagagtcttcattgatatcaaaatactcagcatcatgacctccgctattaatgcaaaacatcaacggcaaatgattggaagtttgagatatggtcggaaaaatcaaaactatccagacattgtacctccattggaggaggcggaggttgaaaatgtccatgctgctcaattgcctattttggatttttaagtaaggagagaaaacgacttccagggaagttagttggacgcggggcactagaaacttccagatgaaagactacatagaatatagtgcatgcaataagactacggcttaactaatggcgtatcccatatttacggtatgacatggtagatgcaggtaaacaatagaaaagggaggttggcatggctgcgagagatatgtaagagacatataatgtgagaattggtcaaggaaataataggagaaaacatatacaaacgaacagatagtacaaccggccggccgcaccgtcttgttgacaattcaagtgcccaaatgaactatttcttcaatgatgagcagcataaggcccacgcggagttggtgctgtgtgatccgattcctagggaatgcaagaacccccttaagccgtccgcatctcaacttcagaatgaacgcgccagactacttgtgttcatggttggaggtggtgcgatgttcattcataatgaggggactggtattacaagttggaagtcaagtgcaagtagtccaccaggagcaatgtaggaaagtcatcgtattttaaaaagatttagtcatacgcagagcggcaagacacataacggtgacgtcgcatgagtgcccaacgagctgaatcttggccagacaatccgaaaccagactagaagctggatttctagagttgcttagctgccagggctggctgagatatcgggatcatgtatagtggggtgtgaaacccgttaaggttgcagcattctcgataggcttggcgtccctgggaccctgatggccgccaacgtttcgacaaggtagaatagctgcacagtataacacctgaatctcagccgttgattgtcaggctgggcttatccgttggagtgtggtgtacatggtcctgtacggcagcctgaaaccgggaaaagtctggcaccacatccctagcaatgtcatggtctaatgatgttgtttgttggttaactgtagtcggctttccgaggatgaagcgatactgtcaggccaccctttacgaccaagttgatttgcagccgcgcgagacacttgttcgtggtagccagtaaagcgccgcaccagttgtcagatggaggtgggccgtattgcgacaatgtaggttgactagctttttgagagtgaaaggttggtctaatgcaaaatcaggtgacggggctaagggtatgggaatgaagttagaaatacaatacagaactcgttcattgggtatcgaaagaaacaagaaagaccccacgaagacgatgcaaggggatctagtaaagaccgaggtgaagttgagcctccaggccgtctggggtgtaggtacgaatgcaaccaagaaagcattatgaagaatcctcgaagctagaatcggaggaatccgacattgaggagtcccttaccgggacagggacaggagcgccgatactctccaaacctcgagatttttccagagctccattggaaccatcgagctttgtattaggatcaacaccagcttcctttctgagtcgctcatagttatcgccagcttctttgatcatcgcctggatctccacctcacgaactgcgatatctgccttctccttcctcagttcctccatccggctgatcatctgtgtttttgcgacttccatagatgtcagagacatgcgcaacctttcaaaactgctagccagtcgtggaagagatgtcactttgggaggagtcctcggacgatcaataccgcttgacttgccacgacccatggccgaatgaacctgagcggcttcataggcagccttttcctccaagtcagaatcgtcttcgtcggagataccctcagcatcctcaataaggtcacgcattgcttcacgatccttccgcttcttctcgcgctctgcctttcggccgagcgccattttgccatcctccgtgaaggcctcgaacccttccgcaaagtcctcgtcgtcccgaactagtcttgtatcttgttcgacttctttatctcctcttacaaccgcgtcccagtcgtcagtgtgggccgcattgttcacgtccaatgaaatgaactcgtcctccgcaccgtgttccatagctaggcgtgcgcgccgggcttttttctctcggatctcggcttcgcttgggatatgtgcttgtgccgggagagtcataatctccccaaacttagctgcaacatcgacaaccttgctggtttcatcgtcggtagttgtcttcggcgttgagggcgtggaatcgcgaagttccttcaagtagtcatggctataggtaggccggtcttggtcctgaccgactcgtgcagtgattttctcagataacagggaaggaagttgaccggcactttgttctattgccttgcgtccaagaccgtggcgttttggtgggactacttcgctgtcttggtctccatcgtttgacgtctcggggccgaaggataactgcaacttggatctcagcttcagcctagaggaagctggccgcttaacgaccggctctagaaatctccatgtcagcttcgatcgtggtaggcgaatatctagggtagaaaaaagtaatcttagtccacatacctggcgcaacgcctccctcgtcctcctcgtcatccctgccaaccttgcggggctttctgcgattggcaaatttgctgctcatatttggaataacctagcaatcaaaagaggtaacgaagcgatgcaagttggtggcgtgagaggtgtgaacatgaagctgccagctcttatcgcatatctcatatccggaatatcgttcctccggcacagcttgcaccaaactcccaaagtcatcgcggtatcttgaatcttgacaaaccccaagatacccaagcaactcgcccaacatgcctcaagctcagcctgaattgaagaaggttagtgccactgctaatatatgggtctttattgtcctaagatctcagctgacgtcgtgtctttcgtgcagtacatggagaagcgggtcttctgccaactgaatggcaaccgcaaagtcattggtatccttcgtggctacgatgtatgtgtacacccaatgatccagacttcgctatgtcggggttcccgcggctcgttgttgaagataggaggatgacggtccgatcgcacgcggaataactaaccatgctttcgcgcaggtcttcatgaacattgtcttagatgaggcattcgaggagaaggatggcgcagagaaggttgccattggcatggttgtatgttcaatccctatggactagctaagatccccgctaatggatacgcattatcaggtcattcgcggcaactccgtcgtgatgctcgaggctctcgagcgcatatccgataaataagctacgcatctacacgcacaatctacgacgtttctttgattgaaggggcacgcacataggcaccactcgatcaccgagtgctgggaaaagagctaatgctactgggagtttctgggtcggtttctcttatgggaacaatcaaaaccttttttctgttctattttttttctgctcgtttgctacggcgcattttagacgactatggctatcccaatgactttctgactggtacgtctacactagaaatttaccaggggggatgaacacaaggcacaactagttggtattggaatcggaagataaagctgaatcaatattacgcctgggagcatgctttggctccatcctcctgcctgggtcgatgagagagggtagagataataaagagataatgataaaatacatgtgatattcgaaggaacaacgttggatattcatgtgggtcgaccaccaaacttgagcttcagcttgggtgtagacgtggtaggggctttgggggttgcgctttgcgcaggtgatggtcttgggatgtgaattttggggaaatggttgggagtaggagttcctggagccaggccagttttggactgcttgaacgtaatgcgggttgatgatggtgcgtgcatgccctggtcctcgcgcttgcgtttcgaagccagacccatgcggggtttggtagatcgatagaaacgtaacttgccatggccttggttttgcacactccaatatcgaggaagtttcatccgcacgagcttggaagtgattgggtcgtacagtgtacggcaaaggtcggtgagctcggaaagttccaagagacccatggacggtgagttacatgctgcccacatacattccttcatagatgtatcgccagaaagctctcgtttgagggcttcgatggcgccaggaatagtctggcgtcgtgcgatgtcatctcggcggatttgggtagatgattcttgttcgatgatcaaaccaccgttttgggaggcttcggtttgttgaggacgaccgaaagcaatctgtgctagggcctgacctagcaaacgtaaagattggtggcgtatccagggcgaggaatcggccgataatgtgaacataagccaacgaagaagctccgggctgtgggaaatatccaggtcgatcaagcattggaaggcttgcatccggagaaggtcgtaggttcccgctcgcgtgtatggaatgaaacgcatcaaatccaggtccatcatcttggtttgcattaattgcgcctggcattgaagagcagcgcgggagtagaggttctggaaagagctagaccattcgtccatgcgtcgatatcggtcaaactcggcgatagcatccttgtccagttgttcctcggcctgagcctcgaggacacgttccatatcgaaatggtctaattcctcgtccgtccgcacctcgctcttaccaagcatcgcatgacagagggacttcatcaaggaggcaacatagaagttatccgagtactcattgttcgagttgtcattgaacttgagtttatcgaaaaggaatcgcttcacccttaatggagttttgccactattgtcccggactttagagattgcgtcagggatgacttgctgaaggatgtaggccgctcggtcagagaagtcattcgatcgagtcatgggcgatcccgggagacagaaaagctcctggaacgccttctcaagatgatacagtccaacccaatcaatctcttccttggcatgttttaccaaggcacgcgcagccgtagtacgtatgccatggaagtatcgactatccatgagcgttcgaacaaagatcgtagaaatcagagggtgctctcgttgagcagtcatgtattgtaatgactgataatgttagcatagtgactcaacttttcaagacagcagtataaattacctcgagttgggccacaacatctcgatcttgctgaagctgcgagagatacatgtaccctggcataccgagagacagtttacagatccactcgaagtctgcatccattcgtatccactcataggattcctgtcccattcgctcctcgtcctctttcgtccaatcagccaaacgccaagcctgtgtctcttcttcggtttgaagcacatcccccaggcagtacagcagaacctcttcttgaacttccgtatcgcccgaggccacggctctttctctttgttttttgttgcgtttgagccttttgtacttcgtgttgtatggaatgtcgaatttcgtcacgccctccttgatctcaacgatgtgctcataaggagttccatctgcttcgtgaatccgaagggtcattgaccctgtgaagaccggctgcactgcgcccgcgtagacgtgccggacctcttccttcacgtcgcgcaagaatgaatccttgtcgagatctcgagggggttggggttctgattggacttgtctgatcatcatttcaactacgagcttcttcttgttgaatcgctgggttgcttggaatcgtggacatcccgccccgtatacccattgttggaagaatacgtctaatttcgcatgtcccagtcgctcacaggttttttggaacagggaggatgtgacggctccattgggtatatcacccatgcgagagttgaggaaaagtcgagaaataatgcgagacatcgtggccttaccactcgccttggtcagtcggcgatcgagaatgaacaagaccaaaggcgctttcaatgcaacaaagcgatattcggaggggtcaaccttgagaatgttacccatgtcgtatatagaggggcgctcgaagtctaggtcgcagacttgatcagacatctgcttcaatctgaaacggtattcgttgtttccgcaaagctttctcatgaacgtgtctgtaatgtaccatgccacacccaccgtaacccacgtatccgagggttccgcaggaatgatgttgattccagtccactgacaggccagaccgtgcacctgagcccgagtagagtcatacatggggtcgatcatctcggctgggaagagcaggtggctgctgcatattgacatacatgcagtgggaaggctatcggttggtaaatcgtcgacgaaacaaatcttgtaactgccgaatggataagacccgtacgacaaagaaaagaagtcaatcgcctgggccatgggaaaactgctgttttggacttcatcggctctacccgggaggcagaatgcgtgcaaaggaatagcattttggccaagttgctcatcctggtcactttcacgaaagtcggccaggttgacatactcgaatggaccaatggcgaagccaatttgcaaggctcccaatggtgaatatgacgcaaatgaaactgttttgcgggtgtggtctttgggatcgacaatgtcatctgtcaggtcgccggagcacaccactgacatatcaaggccctcgtcgtccggagaaagttggcgggttggcgcttttgggcgggatggggtcgctgcaccggccgcatcttgggtcttccggtcaaaaacataaccaagcgagctgggacatgtgatagaaacctcccaggtacatcgcgaggacatatcatccacacatgggaacaggggacagccgataccagactcgagtgagttagtggtgtaagcatgaggataccgtcgatcaccattttcgacaccgacgaattgtaatccatcccgaatattgtcaataacaaattcgatgttcactgtcaaagccgtgaatcgtggaaggtttgcctctggcgccctggtactcgaaggaccatccacattgtccacagtagattgtagcgcgatttgatcctgtgcttcggccgaagatgggtctagttcatcgatgcggacaccctttggaattgcgatgggcagggtaggtcttgggggagtttgtaacaggctgtgaatcttcggtgtcagtcgctcgtgatagtgtacaccgtagagttgtagcgactcgtagtgatctgtgtattttgttgttgcaggcttgccgttaacgctcagctgcttaatctcgccttgtcgaaaattcaaccagattgtcccgagatctctgcggcgagggtgaattgtgatttccgtccttcccttgaggcttttggatgctagatcaatctcaagttcgactttttgatgtcccacactgaatcccagatcaaactggcgtgccgcggcaccagcgggcagttcgacaacactcggcatgatattctcgtcgaggcctgcggaaataatgtcccagagcctgtcctccagtatcttgaagattcctcagtgacgagatgcgcggggagcgcttcgaagaccatccaccgtcatatccaaccagactcaatatgtgattgtagtattgagggcggaaaaaaaattcgaggagcacttcgcgtggcgcagatcgagctccagatgacgatgaaatgcgagatgggcgattacgcgattatggtgcacggtgtatcgcacggcgctggggtggatcgtaggttgaagaaagatttaagtgagccgcaattaggaagatcgagggcagattagctgcaacaatgcgactcaagtccgaacaatgcactagcaaatcccgtgtggtctcagccaagttgagcttcccttgttcgcgttcccgatgcggagcaaggcacgtgatttcaacctgaaaatccatcttgaaacgcttcctacctctccttttctccacgtatccttgagcgccgagatttgtgtttaaaggcatgatttgattcgctgtgcatttctccattatacccacttgtttgccgaccgcgctatgaactgaggtgctggtgtttcccccgactatactacaactctgcgcggtgacacggcccaatcttcaaaaatgagcgcgatatatcgcatggtccaaggttggtgatatgaagccattgactggcatatttgttcctactcacttgctaattcgaaccttcaactcatacagagacccaagattccctctccgacgaagccctactaccccttaagtcctacaagtattcgagtgtcgataagtcgttcatttctcggtatatcttgaagcactacgtatgacagccttaccttgcccgatcgttaactcggaataaacaattgactcttcccctagtggaatgccttcgtcgaacttgtgccgatgtggatggccccgaacatggtgacccttcttgggttcatgtggatcgtggccaatatcttcatcattcagattttcgtcccagatatggtgggacctgtgagtgttcctgttccttactgggtgttttatcggaagtggcgagttaatcggaaatttcagggtccctcttggatttacttcagctttgcgcttggcttgtggatgtgagtgaccggctacccctccatccacatgatgctaactcatacgaaataggtattcgaccctcgacaatgtggatggtaaacaggcacgccgaaccggcacgtctagcggactgggagaactttttgagtttgtaccgccctccgaaaagccatggatggatcactaacaaggtacagtcacggtatcgactctttgaactgcaccctggccagtctgctttcgacagccgcaatgggctatggatcgtcgcagcttggtgcttggaccgcactcgtgccttgtctggccatgtatttctcgacatgggagacgttccacacccacacgctctacctcggctacttcaatggcccgactgagggcctccttatcatctgtggaattatcatttcctccggaatatggggccctgcgatgtggtctaaacccatcattggattccttgatttcccccaaatcttcggcaacaactccgtcaaggacctctgggtcccatttctcatggctagtttcttcctcgcacatctccccgggtgtattatgaatgtagctgcggcgcgcaagaagcagggtctgccgttcgccccgttgcttaaggagttggtgcctatcctcgccttcactttctgcaacatcgcatggctgttctcgccttattcgactgttctttctgggaaccacctcattttgttctgctggattatcgcattcgtcttcggacgaatgaccaccatgatcattttggcacatcttctgagacagcccttccccctttggacagtgatgcaggctcccctcattgctggggcgatcctcatcaacctgcccatgatcgggttcccggtcattgccccctggctggaactcttatatctctgggtgtacctggtcttcgccctggttatctacatgcattgggcggtcctcgtcatcaaccgcatcaccactttcctcggcatcaactgccttactattcgaaaggataaggccgctgcaagagacagagcctatcgcaacctcggtgaatcgtcccacatcgatcagtctcgcgcttcgactgacacatccaagacacattaacttagtatgcgccacactatcttctatggacgaattgacgatcgacactagttccctgttagagtggccaaaagcgccctggccggcgcattgtttaattgttcaacctcattgtaattatgaacatgtccattccttctacgtgtgttaacatcttgatctgatgagagatataacaaatcccagaggggtggattttgatgaaatccggcatggaaattgtaccctgctattctgcacttttgtacttacaagattattaatatttgtgaatagatcaaaatgatttaaatgaaacccagttcaagttcattaatcgagagaaataatacaggaaattagaaaaggtacgcccaaagaagaacaatcaacgctggcgaaaagagcaaaacagaaaaaattacaaaaacaccgccaacaaaaagttcaaatgggattctgctcccaaattttcatttgtttcctccaagtccaagagcgtcagtcagacctcccagaccaagtccattgattattttatccaatccaagactgccaagcagtccattcaacaatccaccgagaccaagaccatcaagcagacgaccaaccaagccaagcacaccagtaagcaacaagccaacggcagcgatgatctggaacaacggctcagagagcagaccccagagggggttcagcgctttcttggcgtgaggcatatcagcaatacgtttcttgccgttgtcaatggtcttgacaaccgtctcagtgagctccttgatcaggtcggcaagctgatactcctcaggagtggcatcgcgagaagcagcgcgcgccttagcggtcgcggcgatgcgtccatcggggtcaagagcgcggatggctccgttgcactcttgcagaatgcggccgccttcttcgaggagcggcttgacggtttgaacaagcttctcctcgtcaaggtcctccttcttggtatggtcggctttatcgcaggcctgcaagttatgttagtatattgcttttgaggtcttcaatgtcgggttggaacttacctcagtgatctgcttacacacaggcttgactcggtcaagagtctggctaaggatagagatcatcttctcggcgagctgtcggtcggactcagccttcgccgcagcctcctgttcttcggccgtgggcccctcctcgacctcctcctcgggctcggggatgttctcaagcaaggtgcattcgccgatcttattgccatcgttgtcaatgacatagccgttgtcatcaatactcttgccgatcagcgtggcgaggttacccgcagtcagcttgccaataaggttgccgtcctcatcgcggacttcgccctccttattgaccttgcgaccagacatggggttgatatctcgcttcttctcctcaggctcccaacgctcggccttaccgatagagttgccgttcttatcgaggacgtcaccctcctcgtcaaccttacggccaaggagacgcttggcgtcgccttcaattagacgtccgatgatcttgtcaccgtcttgcacaactccatctttgccgacaatagcgttatcgaatccaaagaatggaccttcagccttatcttgctcagtgccagggataagcccagcgcgtccaacaaccttaccattgtcaccccagatttgacccttgccatcgaccttacatccagcgaggcgcttatcaccttcgaggatacgtccaacgactgcaccagtagtaggatcaacaacattgccagacttattaacgaccttgccatcgagaatagagaggtcttcttcgggagcgggctcctcctcggggggctcgtagggctcagcacggcccttgacatttccgtacttatcggtgatctctccatcctcgtcgacagcacgaccacgaagcttcttagcctcgccttcgacaagcttaccaacaatggatccctcatcatcctcgacgaatccatccttggtcacaaagaggctgtccatgccagcgaagataccctcgggcttactgtcgatctcatcctcggggataagctccacacggccaatgaccttctttccgtcgtaaatctcaccctcgtcaatcttcttaccggcgagctccttggggttaccctcgacaacacgggcaatcggatagccgtcgggtccgatgacatagcctgccttgttgcatgtgaggccattgacagcggaaaagtcaggaccagcctcttcctcctcctcgggctcttcctcgggttcgaggcgctcagcccgtccaaggacgttacccttgcggtcgaggatttcgccatcctcgtcaacgccacggccgctcagtttcttcgcatcgccttcgatcagacggccgacgcgggtcgagttctcgtcgaccacaaagccgtcttcaccgacaacgagaccctctagaccggagaaggggccttcgtcgccatcgtgttcctcgatagggagtgccttagcttggccgatcacattgccgcggttgtcccagaactggcccttgtcgtcgagtgtcgagccgagcttagctagtttcttggggtcaccttcggtcacttggccaacgggcttgccggttgcttcgtcgatgatgtagccgagcttgttgcagaccttgccttcgagggtctccaatccggggatattttcctcgacatcttcggcagcatcctcggcggtgtcctgggcatcttcggcggcatcttcggcggcatcttcggcggcatctttggcggcatcttcggcgccttcgaccttgtcgtcgagggcatcggttgcatcttcggcggcatcttcggcggcatcttcggcgccttcgaccttgtcgtcgggggcatcggtaacaccttcggcggtctcttcagcggcatccttggcgtcttcggcggtatcttcggcaccttcaaccttgtcttcggcggtatccttggcgtcgtcgacattatcctcgaggttaatcttgccatcttcggcggtgtccgtagcatcgtcgacagcgccatcaacggcatcagtagcatcttctgcgtcgggggcggcatcttcggcggtagacttagccttgtcgacattcccttcggcatcggaaacaccgtcttcaacctgatcagccgcgccatcaacagcgctcttagcctgatcggcggggatatcgtcctgagcatcttcgtactgatcctcaacatctcccttagcgccatcgaccttgtcagtggcgtcaccagtggcctcttcgatggccttcttctgatcctcaacaggaaccaaatcaacacggccaatgggatcgccatcttcatcaacaatttcaccgtcgtcgttgagggtatacccgataagatcttcagggtcaccctccacaatacggccgacgatctgaccagcagcgttcttgataacaccgccatcagaaacagggaggccttcaagctgagcgatatccgtaacaacgttctcgagatcagcctctccgacgttctcctgggcgtcatcggcggcgttcttagctttgtccgcgacctcgtgcaagatatcgacgcgaccaatcaaatcaccttcctcgtcaacaatctcgccgtcatcaccaacggtttgtccgacgagatcctctggatccccctcgacaaccttgccaatggggttcccatcctgtcctaggatattgccgccctcggcgacatcaagacccttcaaagcagacaggtcgaacggcacgggtaggttatcggtagcagtcttggtggcatccttggcgccacttgtgacactttcagcactcttctcggctgtctccttcgtcttgccagcgacatccttagccttgccggccaagctggagccgccgcggctgagtggggctgcggagccagaggcagaaggcgcctgggatgcggcgtcgtcgggtggggagacggggcggcgctgctcggtgcgtctctttgacttcggggagggtgtctctgggatagactgctcgtcgacgtcgtcttcaattggttcgggggctttctgggagagtttgcggggtgtggcggtcttctttgtgaccttggggcttgcggtgacagtgctgggcttgctggctgcgctggagccggaggctttgcgggctttggcgggggttccggccttggagcccagctttgggggtgctttgttcacggcgggggaagacatgcttgtttcgggtttggatattttggtttcaagatgatttgttatacagaaatcaaaatccagtcggataattgcaaattggaatgcagttgtgtccgctaaaggcgtgggtatacttcgtaaaggcgtatgtgaaatataatgtacaaatcccgggaacaggtatagttcgggagtataatagttatgttgttgtttctagatgagacaaatagaataggaatgaatattgaatagaataaaccctggtacgattactggtgtttataagaagaggtcagtgattctgatatcatcgcaaaagtccatcatagctgtctacctagagactgtaaccaggcaggacacatgcagagcttactacgtcatggaccattgatatcataacgccttttcctataatcatttcttgaaatcccagttcgggggatcggcatagagctaatctacacgatgctcggttagggcgtgatacagtaggcgccgttagcatagcatcatcggcatcataaagcggggcaattagacgtgccaagcagatatttgtctgggaattggtcgatcgatgcgatacttccagggtaggctcacgaatcagaggcccgggactgtgatattgaggggaatgtggcttaatctgagttaaaacgagggtggaggtggagctccgtgctactccagcatggaagcatatacgtctgattcgttgcatgaatgactacaatatcgaatccatccataccatgttcctggccaggtacgtcaagtcccaaggttctagattatctggacagtaaaatatgcccaaagcaacatgattggtcagatagcagtgcatatccatggatattccccgaagccacgctatgccagatgtgggcgaacaaatcacaaagttctatcaggaaggccacatgtgcatatgtgaaagtcgcctccactgcctgtcactgttcttgtttcaggaaaaaatcaaaaaggtcaccagctgcacttcgaatcgcattacatcagaagtcatatgagaacccttgaacagtgcaactatccataactcgtttctccacgcgggcagttagtacaatataggaatcatttacaataagcatattttcaatgacgatgctcaaatatatttgcattcgccatattattcgcaagtcgtagattcagccctaaacaagagaaatcccaagtaaaaccggataatggtcggggtaggtccctgtcggaggtatgaggtatgatatcatttcaatctatttgggtggagagttcagccacacaagtcattggctgatatcatcgtgcaaattcaagaaatattgtttcaaagatccatggtattctctaaatggtaggcttgatatcttgtagttgcaatatactatactatattataactcgtgcaacggctactccgtctgtacatgaattctccggttatcaactaccgaaatcaagatttgcctccacacctcttggcgtctgtgcatttttctttttttggatcgatcgactctacggagtacattgaatgacattgtgctaatataccagacgatagcaaggttctggatataaattgcaagatacaagatgttctcatccaaatctgataccctattcttattttgtattctagagtctagaccaaccctccataatataaagaatgcttgtatttgctcatccaatctcaagatcactctatacttgacttccgatcgagatcgatcggtgtctcttcccgctggtacatcctgggcaagactttagtgttcgccaccgactattgcccgaaatggataggataaacagaatgcatggtactctagctacaacaacgtatgttcagaagttaaaataaattgatagttgctcatcatggacgctttattttgtacaaccaaaaataaactcgtagcattaccttggaaggtaactatggctgtgctactagttagttatggctgtgctgataaattatgtaatcagggtctgtggcgggccattttataactagttcgtggttcctcctgagaatgcattagaaaaaccaggatccccgcctcagggctcagatcaatcactgaagaagaagcttccaagattatccgcagaaagaccaccgtaccctcgcagtccgcagtttcattgacttcttcgggaaactgcctcgatccagctcgatattgctacatacgcagtctacacagatgaatacagtcgtcactcaaggctagaaggcttcaccactacatctccgcggaatatactccgtatccgcgaggtattcgtgtctcttggcggctccactccggcccgagctccgctagctaaacagcgaatctaaagtcgaacgttttctttgacgcacttcagactccatatggatcgcagaattatgtgcgatatagttgactatttacgttggcgatgacatacgaggtttgctttttgatactagagaagggagcgacagaagtatgtacgacaatatatattagacttgtgaattgttgaaataaaagatgagtagaactgaaatctccaacaagaaatgcaaagtcttctatgttccttgtaaagctttgaggcttgacatagatcaatgagaaagaaataacaggcagttcatagagacattcttaaatccttcagctaacagacgaggagcaacgtcgagatatcctggatcgcgctagatgtggcaattatttccgtaaccattgtatacgagcgttattttaagttggagaagctgctttaatttcagccactaggccctaattgaggccgttatccaaggcgcttgagacccactgcttgatagacgcggtcagctccggtatattaaacgcatttgattgttcgagctagtatagcttcctcgtatagaattaggctaagcatcgttagcgtcgcctaatctccaccattttaggttccaccagggaccaatgtcaccctgcccaggtacttggctatttcaagcttagcccttgtagtgtcgagatcgtttgaaactgccacacttactcctttcgttttttgttttctttctcatgtaaggttatttgttgtcatccgaattacatattctcacctttccttgtaatgtttgaaaagcggcgaggacatgattcacaagtggttcctctggctcacctgcctggccgggggtggagtcgaggcattgtcactccaccagcgggacaaaccagcaattgtcaagatcccagttcagcgcgtagagaacgttgccacccggcttcagaaacgaatatctacagtctcggcaccatttgaagttcaggtatggcttccttgctggagtctctacatagaatgactgaccccctttataggaggaaccagaatttgcaagattctttaggagatccaagttcgattggatacaagtagcgggtatctcgcgataaccgcgtccaactcaaactattgtgaatcgacaaacgaagaagcatacttcaacatcagtagcttctcaacgtatcaggtgctcgatcacgatttcaatgcgacatattatcaggaccatattctgacgggagacttcgcacacgagaaagtggcgatcaatggagccattatacccgccatggaactaggtgtcaactttggaatcgatggtgacaatgttcttggcctagaaaaccttgtgggccgagaatcagatgcccctgcgaggatcctccaggctttgatgaaaaccggtgacatcaaatcagccgcgtacagtctgtggatggatgactctattggaaccataggaagcattccctttggtggtgtcaacacggcaaagtacgtcggagaacatgcataccatgtctattccagctatcaacggcgtccaccatctccccgtagccctggtgacagggattgcaattcaagccggcggtgcctccaagaacacgacatccgatttacctttctacgtggctctggactcggcggtgtcatggacatatctcccagatggggttatcgaacagatctataaagacttgggtgcttagtattatggcgatgtcgggagactcaactgcaccgtgggacaaaaaggctataatgtgacatttacattcaccgatttcgatattagcatcccagtgagtgatttcatcctggggggtgatggcgaggtatgcattttcagcattgtacccagtggcggacaaaccgcagtgctaggtgctacgtttttgcagagcatctatgtggtctatgatttgtccaacaacgagatatccatagcgccgacaaacttcagttcgggtgaagacaacatcttggcaatcggcagtgggtcgagtgcgatctctgggggcggtgtctgtgtcggtcactgcatgtgccatagtcccaaccactgtcaccgaaccaaatccgatcagattttttccttctacctccgtttcaagtgcccagagtgccacttcgactagcaagggctgggcaatagctccgactggaagtcccaacagagttatggctggtcttattggtgcagggctcctaatcgtgctataatattatccgagaagggtgaatctgtcccagtcagtgattcaattcagggtgattgcgagtggccagatattcagccttgtacccgcaatgctaggtgatgtggtttttgtaatatacgtgagacattaaatgtgagggtaggtggtaagatagcaggacgcttctacattgtcagactctgttatgaatgatttaaattcatctcagtaaggggccgaggtcttatcagcttcctctgccactttcttggtctctaatgcgcctcaaaatataatgttctggggtcagcttgagccgcttatccgatgtcagtgctctacttaataagagaatagaaaagtacacatatcaaggtcatgtgagcgcaccgggtctagacagcgagccgggtaatcactgagtaatcaactagcccgatgaataagagagtctctagtatcctatagagaagatcgcatgatttgtatgagttaggtaaaccaacgaccaagtactatagtacaggagttgggagtaatgagtgcaggatcggtcctcatagggccgtacatgatcacatgacagatttctgggatctcactaggatagcccgtgaatatatcaattcgcaggtagaatgtatcaaggtgaaatctagcagcgaggtgggtcaaaatcaaacccgctcttgtggaagagcccaatcttccgtatggggctcacgccgccgagcgtgagctttcttccgctgccgtctctctggactgagtttcgccattggaattgcagaacatggccaggaaggtatctctatcaagatctccattgacaagcctacttttgtttttgacggacccaccgtgtaaatgatgctctctggtggaagacgaatcgtaagcgcgggcaacgtctccattaaagacctgagcagagtgatcgatgtcggtgtttgtataacagtgcttgatatggctgggagattggatattgtcggtaccatcgaaagaggtgctgttactttggcgatctaggggtggcgagatatgattagcaagggatgagatggttaagtgagcggacagagacaccttgatcatgacccggtggatgacctctgacgaaccccatggagcgaacttgctcatccgaaaaggaaaaggagcgcgtctcaagggaacggtcacgatcctgagtgtaggtggcgagaccccactcactatgacctagtggaagctctagggccgagtgagaggctccatgggcattcaccgaaggatgaggggccgataggtatgcttccatttcccgacttgagggaccggatgcttgagttgggcagatcggcatagcttatagtagcatgagcgactaagggtagtagaagaggaagaccgtgggaaaactaaagtgggcgcgacaagagccggggcagatggctcttaaagagcgtccatgacagggggtaacaatgcagtacgcagatatgccgataacgatctagtcgaatgcaggatgatcagatcacaagtggcggcaggtgcggatggtaatgagggtctgatcgcccaggcgattgggcgaaccaagcataggtattaaacgacggggcggtgaactcaatctgagaggcaatcgttacggggcttgacattagtaccggactgtatagatatcatagcagatgagaagattgacaggggaaagatttacccagtaaagcagacaggaaatttacaaggacagatatatctcgagattctgctgtcggtcgcgactttcttggggagtactgtacatacgagacactctcctcccagcaaccaaagaataaagcgcctgggaaaaagaatagcggacagccaaacacagcaagccactgctgcaattgaacagcctggatgcattagcccgccgtattcgcctacgcgccgaatcattgatcgtaggattgtctagcctccaaatcacttcgcattagcggctcttcgatcccatggaacgcagtgaacgctagttcgccttgcgccctccgttttccggagctatacagtaagcccggagcgatcaagagagtgcctgagaaccatgttgtggatcctggggtcggatatgacttccggaggcgggatctggaatgggcggttaatattcgaaatcggtcactaataatgcgtatatttgaccaagccgtctcctgagcgctcaaatccgagaaacccgcaaagacggccaaattcaggggccacgtattggtcatattttagtcaatttagttatattgttatattccttatattaatagcccattttagggcccacttttcattttgtaaatcagaccccacgttcagttcctagcatcatacccggccctaggatcagatccatggcatggtcccaaggcgcactattagtcgctagtcgctcttaaactacgaccgtgtatattcataaggacgtaacaacgacagccctttcaaaaagggcatagccggcacaccgaggttcgttctccggttcgagtttgataatttcgggtagaggctgaggagctataggtgaagttacgatacgagaatatcggtgaggtattaaaaatttatgatatccagggaatttagagacaatcgatcgaaatatactattcggtataacaaattttattctattactttatatcatctagagcaggaccaattgtattaattactttaggctgccctatcacaatagcatggcgcagaacctaaattaacgctaaaagattgagcgagaaaggcctaaggactgatactatgaggcatagtagagagctgtctcggggccgtcttcgggatgaaaagaggggttatcaggtctctcttggttctcagcggcttttgataggcccgagagacagatacataggacttttgtcatgcgcagtgacgcgaagttaggtactctctttgtcattggctactaatatagttatagttttgcggctgtctacgggaagcacataggaacacgggccagagcggacggcgattccgccttctcgcccggtctatggcgcacttaacttttttttcatctactacctatttcagcttgggctccatataatttttccaggctattccaggtacttacaaccatagtcgtccgcttagacttaagcaacatgggattcggttctagtagggtgtgtgaccaccgacgcatttatattcaatcataagcttgattctccaacgcttcgatgcattccctcgggtgcctatttgtatatgctacgagaacgagtgttccagggggcagcagtccaatcatattaaattgtagcttagctggaaggatcagtgcggcagtcgcgcgacttgggtgagaatcccaaggtgagaatatctttactatgtaactttagctctcggggttccatggccaatcataaactcgaattaaacgccttccatcccaaacatggaattgttaccaccatgctgtactcagattacatcaggcctttttgatgaaaggtttagaatatctcctattagcacaaatatagttgtagttgagtccagacatatgtgatgagtatgaaactgtaagacggtctggataaaccaaagccaaataaacctaatcaatcaagtggttccccggcgggccgtgtcttatgacccactttccaacgcattttcattagctaatatagcatgtccataactaactaactagttagacctcgttctgaccgatcacagcattttagtaggctgtgagtattgagccttggctaagccttgctttgataggaaatttttggacgaataatagttgctcttcatgtcggtcttgatatttcgaatatctggcagaaggggctattttatgagccattcgtttgcgccgaggtaatcaagagcagtactcggatttttcccgctaatattttctatcttgcatcgacttcattttattgcgagatattttgatcatgatccattctctctccagccacagaactccgaaaatcagccaatatgagtaccgagatggacgaacttagcaaatctttcggtgatctttcgctagtacaaacactggaaatgcttgtggagaggacaatcaaacctgcccttgcggtgcaaaaagaaatcgaacggattcttccaaccgatccttatcttgccgggccgagaagcttcgcgaaaaatataacttatcgaaaatgggcttacaaaattttcaaaaactgctctgcggggttcgcacattcccctggatcttgcttcaaaatccaatacatgaccatttggaatacaaggagatggtggcaaaaaccaaaactctactctggctcgaagtacagttgcaaaggcttgaaataaagcttgaagacatcatcatcgtggacttatttccaatgttgaccgttaaatgggtgaaaagtcaccccgatgagcgcaaaaaagcaattgatgaaatttttgcgctcacacttgattttatttacacgttcaagccgccggttatcctttcgtgccaatgtgttaatttccagggggcaaatgtctggccgtcactgaagcatgaggcggctgaaaagctacgatcatcgatacgaggtgccgaaaacaaacgagtatcagagttctcacacaaagaacatgttacccatattgtacatggcttccacccttctgcaatgcgccgtatgccccgcacgatacctggccgagcgacaaggctcgagcgagaagtcttgctgggtcggataatctcttctttattccaaccgtactcagtatggcgaaataattacatgctcgggaaccgccagagtattaagaaacgggctatcaacgtacacctgcgccaaatgaagaatgaacttgaccagatccatgaagagggacttgctatgggcatatcccaggagccagacatctcccccacacttgctgagtggaaagacatcgataatgcgttggatgagatgtcgaatcaactgtcactcaccaaaatctatgtatttatgacttctgagagcgctatcatctagccaaccggactgatccagcacatagtaatgaatgtgctgcttctcagatgaacgtgcgaagaacattggattttcttttattttctttgctattaaaaatatattttttaaaaagaagatatagaaagtactctaagagtatattacatatactatattatatagctttatatataaatttcaaaatgagaaagaagataaggataatactatctactactataagctaatatctataataccagaaaaatataactattgtaatggggaaactgcgccaccattgcatatgcgctactgtcgaaggaatggcatatttattccctgattcctatccatcggctccttcgccggtccttgatatgatccttgttttattatttgccattgtctattgatacattcgagaatattagagggctaacagtggatatattgacactgatagagtagattgcgtaaaagactaagcaaaaagctatggatttcaaaagacgacagaggaaaggggatggcagagccatgatgatatgaatacaggccagcaatagtcaaaactaaatgcatatggcgagaagtcagcaaatgctgttagaggagtacagcggagttatcagcatactctgacagaaaaagcaaagaactatcaaggaagatgcagagaaacggagtgattcagcctgagcttcatcgactcgacgacatctggcatattcaaagctactccgatgcggtttccctcgtggatcacatcagcaaatagtattcctgcaacatctctgtcggcagagatcacgaagctgccagaatcgccatcctccaggaaatcgccatccacacgagtgataacatattcttcggtgatatgggttgccattgatatttcagcgccatcgatttcatatcgtcgccctttccactgacagacgcttttcgcaccattacagatgcccccagtcacctccgtggtacgacctttcttgaagtagtactcatcagtctgtagttcaccaaactgtgtgatagagctgttaggccggggaagaaaggttgcagatccaccagacaggagattagtcgacgtgggcctctgcttctgcgggatgtcaggtactatgttcgggcggaagtaccgttgctgggcttcggttgtaagctcgacgaatgcccaatcaaggaaccgtttgccatggaccaatagtcctgatgcaaatctgactttgccgagaacgtatggcatagacttcacaacattttgtgtctggatcagactagcgtcggcgacgtcgaggtcctggagccgctgccgagaggcttctctgggttcttctccggcgagaagccgcagctcaatggtctcttcgatctgagccttctgggatgcgaggctttctctgtggtgctgaatatccgcgagtgtacggtctcggtccatctgggcgatagactcgatgatggttgcattttggtcgtcaggggggaaattggcggaaattccagtgcgatcaacctcatcgcggaagggagtgtgtgctgttggtctcacaacatggtagttagttagaaacccaaaatgggcccggtcgtcatatcttagttcaacaaaaccgcccagagttccaacattctgatcaccgctgattccaattgaatcacccatcgccaccaaatctctgtcatcaaaccgatctctgaatgagatggaaggatcatgtttcaggagattaagggttcccggcagaaactccacgtcaacaagcagagctgacaccttcaatgaaagttgtccgatgatccgggcccggatttcgtaccagttggccatgagtagtggctggacgaaaatcacaattccaggtcgcgccgagcgaatgtcagggccaccgacgttgaacgggcaaatcatttgccagttctcccccactgcagaactcatcgtttccacaatactgtgcttgagcgtgtgaaaggcggaaaccactgcacttgttgaggcaatgggatacagatgaggtggagagaagtggtctccgttgagaacctcgacgtgcacattcgtaagggaattcttatgaagcagcttgacaaggctgtctttgataggccctaagcggatgaaggttgacccatcacccgacaccgtaacgcgcagcaaaaagaaatagctgcctgtaactcgtgctttcagggtgtggtggaaagattctgtgggtatccggtgttgactgaggattgcgtcgatctcaggccgaagatgtcgtgttggattttcttctgcagtgagaaattcggtcttcatttccgagttgtcatgtccgtggaatgtgttgctccgaaaggggtctgtgcgataaaggaactcctccagcctcatttcaccttcattgtcctctgactccctcagaagccgacgcctcttccgcgggcttagcgggcctgaagaggcgggacttggaaactcgcggggcttgtaagtggacattctgatctgaaagaaaacaaatggatgaactgaatatttctgctgatgaagttgggagaggaaaaaaagagaaaagagaaaagagttgagtgggcttccaaggtgaattctagcttttcggaccgctcctcagtagggcgtaggcatgcgtccacaataccgccagatgacatgtagacatgtgagctgtttacccgttcagatgtcggcaacctcccgacattgattatcgtaccttgccgtctcaaatttcaatgacttctgaaatccgccgaggacgagttgccaagtaaggcaaaagtcagcacggacgattgcatgcagaccataacaccaaaccaaaatagaatccacgccttagggtccttaatagtctcttttaattagaccaccgagaaagatttttgtcaccaccgtcccgatcctgcgctatgcgtagagatagcacctgtctcgggcccattcggcatcagaaaaaaagataatgccaccccggctgcaagagttatcccaccatgaataatgaataatacgtgccagagggctatcgtgagtgatgtgttcttgctaatcccgtatatcagacaacagcctagtactcgagccagtccatttattgaaacctataacgcggtttgggcattattttcttgcttgcggtactatatactcgttattgtcataaatgctggggagatagtaccttcgctgggcccgagaagaaaacatacagcagcgaatccgccaaaggtttgaggtgcagccagacatatgtagatgatgccctagacaattctgtgcaagtaaacgctgtcagcatatgaaatgatatgacacgaaggccggatgaaaactcacacggtggtaccgacgaatttgtttgatagaagtcgactcattagataaataaaggggtactcagaaaccagttgcccaacgtagaaaatggagcttgaccatgagtattgcgagctggtcatgttgagatcttcgatcaagccgaagatgccagtataactcagactctacttgttaagatattggaggaaaaagatgaagcatatctatgtttgcctattagctagtgtatggctggaatgaaggacgagaaccaattaccaaaggcagaatgactgtgttaatcttgcgtaaaacgggtttctcttcctcggcagtgtaggagccccggagctcgaccaattcaccggtcattcgatcggactccttatttgcgatatccttgctgaaattgtctattgggataaatacctgacaaaggcggttcagtgcagtgatttcaggtcgattggagaccaaccattcactaaatatatacaaagggatgttttatatcagagacaatccccagatttccccttagctataaaagaggatccttatctccaatcaattcggtaaaagatcaccgtgtggagttggtcgtcagtcccataaagacggcaatctgcctgtcaacttgccgatgtagttagatccgatgatccccgcaatgctcaatcatgtcacctcttttaggaatatttaatctcttgatctcttgaatgaacagtatatcgcaatatctcatatcgcatcaattcatcatggcacagaacctccccagctccgatatcaaaccgtggacccgcccggcacccaagggatacaaattcaccaatgcccatattgttgatgtcgcgtcaggcacaatcatagaaaaccagacacttatcgccacggatgggaaaattacctatctaggccaagaatcatccgcaccaacagaactcgagaccgtggattgtcaaggcaaatatcttagtctaggcctgttcgatgtatatatccatttatatgcaatcttaggtttcagtgacttatctaaagccttcgaaaatctaaataactagttataggcacccacgctaaacaatgcccatagacccagggcgggtatgcccggcttacgtaaggcccatgggcactgcccaccgtaccgcccgtgggcgatgtcgcagtctaaatacttcacttctcctgtagttctagtttgcttgatagagcttggttatacaagtatataatattaattattaatagtcggaagtaataggagttatataaggtataaaccgatttttaagaagcaattgcaaatattgctagtatattaaagcaaagataaatatgtagcatattatagtaaactaatataggcctctcagtatattcatgagcaatcatatccatattaattaaaggaaaaaaatagcagctttattgctgtttacacagaacttatagtcattcattctattaagttccccaattttttctactgtgtgatacttcgtaccattcggtgccataagtatcggtcctgcatgctgttcatgaacaaatgtttaagcagcaatatagtagatgtttatggcacgaatttagccgacagtgtagctagtagagtccagcatgctcactccttgagaacaagggactaggttgaaaatggtatagcttatgttcaaatcagctcgctagtcatcgttttctgcatttgatcgaacaaaaaatccaagagagtaggtgtttcagaacgaatgctacgatccaataacagtcaactgccgctgagctgtgaaagtctgtgcggtggtcgagcgacggcgggtgatccccactcaggttatcaccctgtctatagcgcactcacccttgtcacccccggtcgcgcgactataaagcggcagtcacctgtttctcacccaggcggcacccacccgacttttgaccgcacataagccacacgccggcgggnnnnnnnnnnnnnnnnnnnnnnnnnnnnnnnnnnnnnnnnnnnnnnnnnnnnnnnnnnnnnnnnnnnnnnnnnnnnnnnnnnnnnnnnnnnnnnnnnnnnnnnnnnnnnnnnnnnnnnnnnnnnnnnnnnnnncgccggtgagttagtagttgggtgggtgaccaccagcgaatcctcactgttgtatgtttttgtttttgtttgtttagtatagcaataaatagtatgttcatcttaggccccattgtggaagtctataataaccttctggaaatgaagcttaacgagacataggatatatgacgctatgaccatctaggggcagaggtcacctgacctgatgttgacgatgagatataagccgtcttaccattccaccaacggtagtctatagttctcagccattatatgtttccctccagtgctatatcagacacatacgaccatagggtgtggaaaatagggcttcccgtccgctcagccgtactcaagccacatgttatatacagctaatactcaattcgcccttagtatataagtgttagagcaggtgggcctgacaccaccttgctagaatgggtacgtatctaataagccaacgacttaccaaaaagaccactataacaacccagatggttgttatgtcaggtttctaatttatataccctttttaccccactcttggtgcaccaaaccaatcagacccaatactagatccaccttacacagaggggttctaacaatataataacaggaggcctactagtactataagtataaaaaggccttctaagtgttacgattgacatgtttgcttgtttatttgtttgctgtttgcattgtttgtaaagtagtcagctataataacccctgcctcccactttacaacttgcttcttctttctctctctatcttagttattttgaatagagtactctttcattattataagaagtataaatctttcagtcgcgactttctcggccatcgtgaaatcatccaggcgacctttcgaggctggcagatcctttgggtcaaggagctcggcacccttcttgatgatttcctagtacacagtttcgtgaagccgcgattggatatgatatatggtaaggcttcctcacacgttcacagactagcaatacatacttcaagcttcatgatcaaaggtacattacaaaattgatataaaacatccctttttgatttgagtccaatgagaatatccagatatcttccgtagatgctctattcgacaggcgcaggactctctaagatggcctaaatagccaccaacttagtaatgaaacgtctttaaagctatccagtgttcttgttgtagagtttaattatgtatcgttattgcgatcaactgggataagggggaaattaaaattagcccccctccaaacacgcaagtttgtttgaggaaccccggttggatttcctgtttgtgagttagcgaatatatctcccattccttcggggaaaagcatgttcagcgctatatgataatgtaaccgaacagcgtataattattgcgaaagagctgttttcatcacttggtgtttagagttgcggaaatcgatcggattatgctgactcgcccctgtctcatcgtttttatcaatggtcaataggaatcttatcatggccagggattgttaagaggacaacaggcaagacgactacggccgaggactgttttcggtaattcccccgtcattgatcacataaaccttcgagaatgcaactcaacgggttgggggatagaatatcccaaatgtacatttttttacaccaagattttatgcaattgtgtcttcgatgctagtcaggcttgctggtcgaggttaggctcattctcagtagcaatcactcttccttcccatgctcctcctacgagacttatttaggtcgacgaaatatatggcatctgcctcacccattctaatgggaaggcttctgcttgctcgacaagccagatcgccatacacttcctggtaatcctcagcccagagcctttctgtccaacgtagccagcgcttggtttgccctcgtctccgtcagtaatggcgcccactcgatacacagtccattcgatatctttcccatggctctgaaatgtattcccgatttcaacaaactctttataagctggtcgaccaaaagcccatactaaccccgtcaatgccgctcgtgcaacagagcgctgatcctgttctgcgtacacactcactgtcgtcatcgcaaacacccgcctcacaccacattcccgcatcacgcgtagcagtagggtgtagaaggaagggaacacaccacgatacgtatcgttccatgatttgtatccaggacccgggggccctagggccgaaattatgacagcttggcctcgtactgcgccccgtaaggtctcttcatccgtgatactgccttcgattacctacttgccgcagcttgattagccgatgctttgaccatgagggagtaagcgtaattacctggactttgggtgcgagatcctgggatagtttcccggcattgcgcacgaacgctgtaacttgatgtccatttgtgatggccttgcgggtgatttgttccccacaagcaccagttgcacccaagatcaaaatcttcatgccgaagactaatacggtcgaagaggctcaagcgtatttgactttttgtaaattggaaattggcatgaaatgtaacataagtggccggaattggtaattgataagtgatggagcaatatattcaaggacgaggtaacgtgctcagacattcatatttatatcccaggcaattttggcggcagcgtagttaggtccactttacacctaccgaagacgggattaatagaagcacggccttaactccggtttggcccgtcttgtcagctacttgttattgttagtaacacccgtatggtattcttaattccttatcataagaactccgattgttacttctggacatacttgaacgggtctcctcttaaagccgccatagactctaatgctgacgtgtaccgggtttatcttaacgccgaattatgaccatcgatatatgtgataaaagaatttcattttttgccgctgtaaaccgcaccggaacttttatcatgtaggtagacatctccgcattcaccaagctgagcagagactggtttacgatttcaaaacgtcgttgagtaaggtatagaccaaggagaggtcaattaagtaattgacagcgctcaacgcccccttttttattttatttacggggctcggcgtatcttaccacagtggaaaggtaaatcagagagcagaaaaggatgtttagggttgctattattagggagaagatagtcaataagccaggggcttcggacagcttgggaagcaacttgcatccattctttctttgtcgggtgaatgcaaatgttcatattgtcacattctccggaacggaaggctcaagatgcgatcacccatatcagcgaacagcattttatgtgagtacctaacactgcaccgaattcattgcgatatgggctttcgcacgtcgtaaattagtaggcgagaatgaaaggttacggacggaaacacttgtggtacccttgatactctgcacgctcctgaaattcttaaggccgtcttaatgccgtcctagaaacccggccgtgacactccgtatccgaaacgatatgacgccgaaacttcctagacatgcggccagggcaagaagcaggcgctggctagctctttagatggttggggattgggttaggatagtgtcctttcccttgtcattgtggccttgtatgacaagtcgagacttttcgtaaggctttcacgacacagcctttacttctcgtaccatccgcgacttgaagatgcgctcgcctccgtggctcgtcgggtcgtacttctcaaagcgaaaaactccttggttaaagaggtcttcgatctccttggcgtccgaagcttcgaatggttcaccaggtgtcgtgatgactctattatttcttagcttgatcgccagttccaaatcgttcacctttttttcttgacaggaaggcggacgcggtcttgttcttggaacctctcgggcgtccacgtcggcggggctgaggggcctcgacgataggtggcggggggtcatgttgactgaccggctccgtggtatcttgcttaggcgcccggtggtagggtttcactgatgtagacctgaaacttgtgggaccgttcaccatatccactataatgtcgtgtccctcaatcgaaacaatcttgcacggaccttgtcatccttcgttctccctccaaataaatacttcactctgtaacgggagcgaaagaacctcggaggtagaggggccgtttcgggcatgaagcgcgtcgttaacccgtcgttcagcattggccttccgtagggcggtcatcgctttgttgatggcttcagctcattttgtagtcgaaggtgaaggcggtgattcggtcgtcatcctagggtaagcaccaaagactagcaaggtaggaaccaagccatctggtcccgctgtgttattaacagctttcattgccatttgaagtatagcctcatcacttgtgaatccactgagctctgctgacaggatttcccatgcacgcttgagtggtccatgagacttctcaaccttgccaatggaatggtgggtcaactgatacttattcttaaaacactctgcggcacataaaacggctcgcacaatagactttgtggaacggaaacatctgatacaggcgacaccaccaatcgctcgttccaggccaatagaattatagaaaggacctagatcgtacggtggctgcttgggatacgttcacagcacttgatttgctgagtaagagtccggggatgaatcagatgagcttgaggtcacggagcggagtcccgaagacgctagtactcaccattgcaaaccaccacgcttgaggaagcagagagcctcacccagctattcgaatacaagctgcctgactgggcgctgaggaacgataatcagcaatcgaggttggagtgaggatgacggagaacggggtctgatcttgccacaggaacaggctaggagctcgacgtggaggagcttacgcgggatgcgggaagagaggagatgtgggaggtggatggtacatgcatccacgcactctttgtagacctattgccttatggatatgtgttggagagtgtatcacgcgactgtgaccactccgccccaggacttcctgttagatagtttccatagtctctcgctcttccttttcctctccagagtccatcatcaatacagatgtattgtcatcatttctatcttccggcatcgtagctttctgtccctccgacaatatggcttctctactgtaccttgggttttgtaggttttatgttccgcttacatgtaataggtgctcccactcttcgagaaccaggaatgggatatagagttatgccaagcctgggtacccaccgtggcctgtttgggctttcttagaaggtactaagcctattttggaacgtcgatccggggaaccatctgcctgcacatgttgactggactacactcttccagcctcacttctcacttctcgcttctcacttctttgttcttcctttaaccttgtcttgccactttactcaaggtactcgatccgcaagctcttactttcttctcatttcttccttcagccttaactctccactttccttaagcactcgatctgcaaactcttactttcttcccttttctcaattgagtctccacttctttcacatcgagactttgaaaatgtcctctccaaccaagaagacgaagagcaaacgtggaagtctctccaatgtcttcgaaggacttgacatcaaacccgcctctccctatccacatccgccgtctactagaatcaaccttgccaagtccatccgccactacatgcaatcaactcttcgctttggacaaggaactgtttctcctcgcagtttaagtaaaatgcaatctcggtttacgatttgcatggacgaagcctacgattacaagattggcacacaagacttcgacccggacaccatttttcctgagattatcaccctcggcaatcaactctccgcccttttacaaaagcaactcacacccctgcaagaaagtgagttcgaaaatcacgtcctccattgccttgccactatagtgtacggatccaacatgatcgagcgcgctggaagcggttccaaaatcacactcaagctttgcatggcaatcttccgcggggaggaaataccagaggacattggagaaacggaggaagagttcttagagttaaaaaaagagcttctacgcaagaatatgccagcaaacgtctccgcagttttacgaagtcgccgtgaaatcgttcaacatgccaaggctgcctcgtatatgattagtcaactctgcgtttatgataaagatcttagtgaagagatcatcctccagactcataaaattcttacgcacaaagtcgacgctgaaagcactccctgggaagaatacagtggtgtctatcgtacggatgaagtttctgcgggcctccatccgtttcctcatcacagccttgtgccttacaaaatgaaagcaatggtccgcgaactccagtctgacatgagagaagtcattgctaagggaacgattgaccctatcgccattgcttcgaaatatactcacatctttatcaatattcatcctttcatcgacggcaatggacgtacgtgtcgtctgatcttgaactcgatactccttaagcttggcagttttcttgtatgcatcggcgagaaggaagaggaccgctccctttacatggaagtcgctagcaatggaggggcactggaggatatgtatggagatcttgatgacgaagagagaccagttatgcacagggagctaggaagttttgttatgtcacatgtcaaagagaggatgcgcaagctggtttctatgctttcgtaaagtctcttaggtctgacttcggaatatcaaaaatggagtttatttttctataagttgaggcttggccatctatggatgtagtgtatagactgcctatctcgtatatcaaggtatagagaggctaaaataaacacttgagattaggtggtactcccagagaattacacaccgcaatctgtcgtcagagataactaaagtgtctgaaagtaggttgtagcaccttgcccatatatccaccgttttgccgtcctaggaatatttgttattgtagtaattcaaggaggtgggtgtagcattgcctccttaccaaatcagcaaattgaaatcagaggagtatcttcgcggcctcgcgtattagagaatagacaagacgtgtccctaaagggctgaggcatgcaattacacactacgattctctttttccgaggaagaaagtcatactgtaaaaaaagtaggtgggtgacccgatataaatccgtcccactttgaaccttacagatatggtaagatgacctggcctctcgaatagttatccaagagaaagatctcgctgatttcataaagagctacccccgccgggggacgcatagatcatttataatcagagtaccggacgatatcaacgaacaaccagcgattgaattatcactactatatatgtctgtttgcaagaacgttctttgatcaaaacatggaagaacttgcctatacctaagaataaaccagcactacctttcctatcaagaatacaaagaagaaatcaagcctaatcgaggattctagctaagaagtgccgacttaagtaacaaaaatgaggttctttaatctggatgtataggagggtaataaattacatgggatacttaagtcatcagataaatagattttgacattcgctacgctttgacatccgatgggcgatcggaagccgggcaatacatattccggattgccaagagaggccaagaattagcggtcccattttgatattcgctcagctgacggccgatttatttgtcttggcaatgtttatctgatagatcatcccgtggtatccctagcataccactgaggagcactcgacgttcatatcacaatcaagcctgcggaatcatcgatcaatctatatgaagcgggcacgctcttgctccccagtccctctgcccccgaatcatagaaagatcgttcgtacggtcgctagccttacctctgatgctctccaggagcacgacgattctattcagcccctttctccattggctctatttgatatgtttcctcaacagatcgccagtctgtcggatgttccaatcatacctcctccttccacacgctcctcaacgatcgcgatcgagcagtccgtcccgaccgagtgatgtataatatcgcgccggctatcttcggcgcgcaaatattttcgtagataacgatatacctacaaatatctgttcttatgcagataagaaaatatttcgtgatttgatggacgatgctcatttgcaccagatggccgaaaagctgtggagcaaatccaagaaacttatcaagaaaccatcgggtgaagctgaatggacggaagccttacatacaggctgtgcgtaatcaaggcaagctattatatttctggtggaggaatcccgaattgaactattttagtgctaacttcttagcaagactggcgcgaagacctaaaaccaccagtatataaccctcaacctaccatcccacggaaacgaagtcagtcatatcgccttgtattcgaaatcgccgccagcgatagacactcttcgcatgcagctggatcagggcccccgttgccagctactcctgtgtccaaattgaaaaccccacgtccagatatatgcgttgggttgtcagatgagagcttggttaatgacctcgagcctaagaagggccgcagtgccgctagaagctttctactagacttgcaagataccactagtcttgtcagcgatccacacgtcacccctttgggccttcgtttcccatttttgatagtcgaggcaaaggctggttcgactggaggtaacctctaccaggcacagaaccaagctgcggtaggtggctcaacagctcttctgattttgcgaaacctttcggagctgaagtctgctcaaagtttggattgcaagagtcaaggaagttctcaggccagtattaggccaattgagagcttacccaacctcatatctcatatggtcttttctgttactacggagggcccaatttatgaactgtggcttcattttcagagactaagcgaagaaaacttctctatggtttgcatcggggcctggaggacgaccgtgaaagacgacactctgaatctcttacgctacctttgggcagttttgagatggggaaatggtgaactcagagatagcattgtgaatgctctcggggccttatagaatgagtacacaagtcagtagccaattcgcttttgtcaaccaatttgatgcatcatgacgataatatccccttttagcaattcaaaaattccatagcgaaagccatttgaatgaaaggtacatacgcgctcgaaatcagtttcacctccttactctcttccactctttcttgaacgcatgcctttggttacccctgacccacacagaccccaagtgttatgatcgcaagagggttttccttggatggtctgcagtgtacactctggcgtatggtgattctccattgcgtagcctgcgtagttcctgtggagtttaagtggtatgtgatatttgcaccgggatgtatgtgtaagcatgggcaaatcagaagggctgtagcgagtctacagggcgacaaaaccacaacaactaatcgaactgaagacatactagtatctcttttggggctgtgtgcagatgccaaggatcgaaacgtttcaggttcaacttgtaatccaatcatatcacgctctgtgtcactaggaggtcagtgcgggcgtcacgctatctagggtgattctcacccaccttggattcctgaaactcccgacatttgccagtcttccatttgccggagaaagtacgggggaaggagatctcgtcgccacttttcttcttcattggagaatccctgacctaaatcccccgagttgcataccatcggacccgtctcccgtggagcgaatggcagccaagcaggtgcgagcacaccaggcaacctattatgaccgaaatcttcggcaggtagcgcctgggcaatgcttcaacgcggcgattgaggatggtacaaacataatttttttgacgtttggtgacgacatggctgtatgtgaggagacggtgaattcaatcgcacgagcactccaagtcggccacgattctgatcgtgaccggccgtcgaaacgtcggtaggaattgagtataaatgtgaattgctattaggatccaaagatctggaattttgtcttatatagattacggccagtagacttgcggcctctgtggttactcagctagatgggcacgaagtcaatggatcgaaagctttggcagacctgggcattttcttgctaagtgtctcaatcgtctcaaaatttttaattggccctccagtcataaagtccgaccctaaggagtacaccatcggctgggtatgcgcggtcagtacggaacttacaatggcgaaaagttttcttgacgaagagcaccaatgaccagatcctctttcgcccgcggacaataataactacaattgtgacaggatgggaaagcacacggatattgttgccgtctgatccaatggggaaaacggtgtatcttcagcagcaagtgtcgcgagaaacatgttgcataatttcctaactttacagtaggatcggcctgatagtgggcatcggttgtgctgcaccaagttcaaaacacgatgttcgcttgagtgctgcaaagcgaccctttgcgactgggcagcgggggcgatcagcggtgactctgtatttgtggcctttgttgaatatcctacgccaaaaaaaccaagcgatgtattcgcctttctgcacagtgaaacgaccatgatcgatctgagtagcgaccccgggttccgcagtcatctcccgcgcgaaagtgacgcaatcaggaatcaggagcaatttcgattcatgtgagtccagtaagccattctcagtatgcttagctctaggcagacgaccattggtctgtttctgcggcagagttttgagcagcacttctaaacccgataagttacctttttcttgcccagatgatcaagatgcaaccagcgaccccacttgagctatcttccggattgcggagagcccccaccccctcccacatcgccccgctcagattctgggtggcaaatatggaccccggcgccgacctcttaagtctaatcaaatcactcggcccgggtgataaccatctttacatgccaaaagggttggcggaaagcccaaggcaaagctaattaaaagggacgattgggcagagatcagcatcgtgtctcgcattgtctcaaattcgggtgcaaaacgatcgagtcaattacaaagctacagcaccttccgtgctttcctttcttcatccctatctggctttctgttgacacccataaagcaagaaggcacgatgtcaccgtcccagaatgcaacaggtgtttttgggcagctcgcacgtgtcttagcgccagacaagcctcttaacgtgctgatcacgggtacgtagacgtccgaagacaatcggtgtgcgataattcagccagccattagcacccggatgtaggattgtgatgtaattggacgtagagcatgaatgcgttcgaacttgaatgacgcaaacacctcttaccgaaatttctcatgtcgcgctcataactcatactcgaaaaaaggtatataaatacccgaatctaccccttaaatgaatcttcttctacactcctcgctggcaatctactaaaacttgactctttaaaaactacactatggcaaaggttgggttttcgtgaattctgaaagtttcttttcattctaatcaatgcttgtttttcttatagtcagtaattatcatgtttgaggacccggactcgtgggaaaatgagagagaaaatgttgataggtaggcggaaagtccaacttgggatttcttgtttgctatggtgcggctgacacgtacatcaagcattttggacaaatacactggaacctcaggatatccttccaccagatctttgccccctattattgtcggtgcagagtgagtttgtccttcgtgttttgaaagaactatctaacgtagacaatgcagactcggtgaagaggccgtcgaggagttgaggagcctgagtggagtactggtgcggtgtccggatgaagaggaagattagttattgacgctcacttggctgcaacatggcaggccgatctttgtactaagatcgaacaccagaaaataaagatgccaatatcccgcttacgtagctcagggagtatttttttatcttttttatttcaattaaagtgattagtcatgacatctttgtgcctttcgttttaggctaggaaaccagcggcttcggacggttcgcttgggaaatacattaatatgacgaacgaccacctactatggttgataaagacctgatgatacggccatcgtggcatcaatgagcgattgtactaagcacaaactgggatagctgtgaacgtgatgcctattgaacgatgtcagaaaactgatgctcacagatttgcaaaatgaaagatattttcccaaataaggggaggcttctctaaagttcaaggattctagaatgatagtcaaaggaatcacaaaagtagtggttcgtatctactttcagtctttatttctatcttatttatataccattttatagtttgttgtgtcaatcatatcatatctcacagtctttccattctatgccttgatagcattattaaataagcatcaaatcaccattccagctgtaagctgtggaaattaatatacccccatgatatcatcacaatttccagctctttatgctctctcaataagtgctcggatttcttcgagatcaaacggagcaagatctacctcatcgccgccctgatagagaaccgtcaagggcatctcatctggactatgctggggatgaataaatccactatccacaatgacaaaatcaacctcctccccacgattttcatccgcctcgaagaacatagacataaattgcgactctagctccatccaaggagcccagtaatgcacaaccaccgactttgggctcttctgaattgcttcgaaaacttcaccagggctaaaagaagaattgagggttagtcgtataaggagagagttgaggaaagaagctggcgtactcttgcaggatttggactggcattttgagagtattaggcttgggcttggggctttgaattaaatcagattgagtcttgtgatttgggagaggggcgtaaggcttaacttatagacagacctgggcggcccagcgtccgttcccagcttagattttcagctgagctaaacgaaagatctgatcttccttctctacgtcatcaatgaaaattgtaacttgctgagatatcgacgaatttgatttcgaataactctggagtacgaaagtgctacacgggcagaaggtttgatcagcagtgttgacgatcttggcaagaattccctaaccaccccctaactacctgattgggaggcctgcagcatctagaaggggcacagctgcatgtgaaccatgaattcattggacggacgacccacagtttgtttgtcctagcggcgttcggctctcccgaggagatagtgatcgttctacccgagcgaatccgctgagttctgcagtgcataacgtagatataaaccgcacatcattccaagatatccgcatttcagctgaaattctggtcgccactttctttcaactcgaaccagcaatttttccgaagagacttagctcttgactaccgcacaaacaacaacttcgtgttcaacgttacctagttcctactcacaatatctgttcaagtcacttataatccagactttagccaaaactttccgattaactagttcagggctatctcgttaaacccatcttcactaagaggaccccggaaattgcacttccgctttctttattttttaggcatgggcaaacccatactttgccgaaatgccctttacctcaaactatttagatttttgattctttggtcgcattcacttcgtgaaactccgccctcaaaaaattggctagtgtggaaagtgggcttaagacatttggaatatcgagaaaggatcgtcggttaggcaaactccgagtttacagagtttatatcctcggccaacccttcacctttaggacaaactaaaatactatactcattctattcacagaattgaatatataaataacatggcggtgtcgcactagtaacaagtccactcactagaggtctccatgtacagcatatacatctttcctcaaaccttgacggcgatggttaatgtatctgatagtcatgaagccgtttacgaggctacttccgcccagctacgctcttccctcaaccaacccgccttaagtggccctcaaaatgcccccgcactgcgtctaacgaaccctcgtctagcgcggctggctccttgatcacggttagccggtggcgcgcccagagctgatcgttaggcgtaggattcgggttttctaagctgtactcgtggagatcttcgtagactcccgccttaatccacgaagtgaggatttcgattgctttgtggaaggggttcggagcagtaggttgtgcggtagacgacccagccccaggtctcttcgcgcatgtcctggagcatgcgactggaggtgcggttgaagtcgatagaccttatggtcgcttcgtcgagtcgaggcggtctaaacatgatggataattgttcaagagatttgtattaggaagagagagatcgagggtgtatgtgtttgagaaagatctggcagaatgagttaacagagcagaaaacactctagccgctgatatctcagtccaagacgctatttactaccgtgagtggcgttccttggttccaacgccccccacccgaagcactttgatgaagccttcgatactaggtagccataggcgttcagcaccgagacgtctaccccagaaacatgctccttgttcgtggaaacctagataggatggtttggattgacttcggcatcgcaacaaccttcaccaactttggacctgaacagctggcctattgtcagcacgaaattgcgctcatagagggacttggggaattactggtaagggctccgttgctgcccatgttagaagtattcggcgtgttaactgacgaatgtagagagaggaccaagctgagggactcccaccgaatacaaaattatattgagggctttataggcattcagtggttccgacacttctttatggcagctatgcggttcttgtaacagagatagatcggccgttggggattgtctaatgtcattatgagtgatgcaggtcatgtaacacgccaggtacttctagtaaagtgctgtcctgacttgagcagtgcaatttttccaacccaactgtgctcaccagtttcctttgactccggcctctaatcatatttactcgtaaagggatcatcatgcccttgggacgattagtgggtctcgactctcaatccgttccttcccgccggtccgggccgaacctaccacataccttaagcttaaagtaggggatgagccccaaattgggttacaaacaatgtaaacactctaattatgtatataatcctgcttggtttgcaggttcgtgaacaccaagaccctgatttatgcaaaaaccgggtcaaactgggtccagactgctttttgacgagggcattcattggaatttccatcaaaaggggactgaaaatacggcatctgtcaaaataatccatgagaattgccagtggctaagatgctaagagaaatatgtaatcacaacatccgtcaaatagaatggttaatccctggaattgaaattgacgctgcctgtcataggatagcgttgacagagaggtatcaaatggcccgcatgatccttccccgtcgctctcaacaatttaaaaagccacaatcatgacttagtccactgtctgatgaatgcagagcacgtcgacagcaacctgttctggttacgtacatcccagaaaatagccgcagtgccgccaatgagcatgactattgtaatctgcttcgggaaaatgccacgactgtgcttcttagcagatttcgccggctctgcatccatcgcaggtaatggaagatattccaaataaggccctcccctcgagaaactagcatacagcttagccttaatcctgtcactaacccagggaacgatgtgacgggccgcaaatttgagaacccaggtatcttgggcttcatagcgcgtaatctgaccggacagatcaacgaccgtttttgctcgaggctcctgaccagcgatatattgattgaaaacctcggtcaactgctgaagggatggcatggggttgtccttgagtaaaggcacgagaccgttggtcaaacgagcaataccttcataagccaggttaccacctaaaccaggattgattgtagcctgccgaattaagaaattagttaaatgattgaagttcggcgggagatcccaaaccttatgaactgagtcacccatcagaacaacccggttgtgactccactgtttgatgacaccttcctccaatggtaccattgtgcctttgactctagcatcccaaagatctttcacggtatactcagggcccactagagaactgccgtatttcaggattgttgcctctgcgtcttcatccgtgaatcgcgggcagttgggggttctcgtgcatttggagtccttgacaaaaagaaaccaaaaaacaagcccaggcacaccagcagctgcaattgctgagtatttatcgtaatacacgttgtggaccatcgcatcaggtaggaactgcttcccagcatcgttccgggagacagcaaagatgcagtcgtactcgcttgtaaaggctatattccagagactgtcagttagaatgggtttgggagtagcaaaacagataggctggactaaccctcgttgatttcattagcaagagcctgatcagtcacgctgattttgtcggccatcagctttctcactttgctatgaattccgtccgcgccgatcaggatgtgaccgtggtgctgcgtgccatcttcggtggtgacgataaccgtctgtggggtttcttcatacccaacgacagcagttcgagcatggagcttcgatttgtcttgaacatggttgtacagcacctccaatgctttgcatcgctccatgaagacaatgggacgttgaagactatgccccacaaagtcatggtattagcacatttctttcatcggccacttccatcaatcaatacggcaagtagtaaactatatatagacctacatttcattgatgtcgactagaacaagtgagtcctcaaagcaatggccgtttccatcataatgttttcgaacttgcagaggtataacctgtctctcaatatcctcccatactcctagctgctctagaattcttatggtatgcggatggattccgatagaggcgcccagttgtgttgcaaagtctcctctttcaaaaagctcatattcgattccggcgcgctcaaaagctagggctaggccgagacccacaagactcccaccagctatgaggaccttgaactgatttttgtcttgatcgaacgacgccatgagtagagatgcttagatgcaggagtgacaaataattacggcggaatattttgtgaatttgagttgcatagttataaataatatgtaggttgtccggagtaaacaacccctttatatttcccattccgaagggttattgtgcaaaaggtggagaagaagattcaatgggcgcacctaagaggtccgtgcaatcgtctatactaaaagtagtattcggtaactacgaattctagattttaccaaggcgaattgtgtgcttggtgaaacagattgatcccgtaaacgtgggcaggtggggttgcaaaggcgatgaatattcacagcccgggtttccgaatatacatatgccggtgcaaggtaagggaatgcgccgctagtccggtacattatttgttgcgagttaaagacaatcctattgtgcactctggtcattggattctgcttctaggtacatcatataggcagttgttctcttgatttttccgggaacttccgaaactgacaagcagcgctaacgactagctccaattactcacgtatcatgtagtgacccgctccattaaaggggggccgttgcaaaatggtgcactgttgtagatgatctggaatttttgatcttagtctgttgttactaccttaactgatggttactctgtgcactcgtcactctatggcttagaccaaaatcacttatgatgcagctattcagatacctcattctcaccgttaggatgtatctagacacggccccacattccatcccaccggtctaacggctatactcaacttggaggaatgaggcttgacaaggttcgtcggaaattattcaggatgcacaagtaaagttaattgtcagctcactagttgactattgtctagaatgagttaacaatagaattagaatttattgatctgcatatgcagcctgacagctccgtagtgcgcaaaagtaccagaagtttggaagaaaccagtcacatataggctttctcttttttccagctcacaaaacatgccttgcccggttttgactcggattcgcgtcgtctggctcttgaaatgttgaccgaacccatatgcaaagaggccttcaacttttctaatagctaccatgtctgcctctgtcgagccaattttgacagcagaagagcggcacctgcagtcgctcatctacggtctaatcattagcacgggaatcctgtctatgatagtctgcagcttacgagtaaggacctactggctcgtcaaacgcgagaacctgtagagtacggcacatgagctgattttgcctctagctttacacaagagcattcgtcatcaaaaattttgggatggatgatatcgctgtctgcgtggcattggtatgtccaaccttccattacagctatacaacagccatgacgactaacagtcttaattcttaggttatcacgcaggcctttaatgggctgggagttgctgtggtatattacggagaaggaatacattttaacaaggtgtctgctgaaaatcgagcaatctggctcaaggtatgattcaaacaaatcattcgctcccaaacatgttaacctgggtaatagctttattatgtggcaatgtgcctgtacctctacgcctccttatctgtcaaagtcagcttgctgctatttctacgacggatcttcatcaaacgtgagtctttcattacacaaaatccaagctaggatgacctggtgctgactccacgtccaggctggatgaatgctctcactataggcatgattgtcttccaagtcttgttctcggtctcgggttcattcgttctagccttccaatgtgaccctgtaaggtaaaggaatcccctctcaggatatctgaaagacatactaacaagagtaggggtgcctatgacttaacagtcgcgaatccgaaatgctactcgcagtacaaactctttcagatcacattataccaggccgttcttatcttcgtttgcgatgtcatcatcctgattgcgccactggttattctatgcggactacagatgcccacacggaaaatcatcgctttgatggcaatcttcggatcaggttcgcacacaccccgttatatctgggccggtaaatgctaactctgactgcaggtataatcgcctgtatctcccccgttgttcgcttcagcacattggattatctgcgccatggcactacggatctgacctgtgagtgcacgctccttccaaatctggctctttactcgctgtatgtctgacgctgaccattacccacagacgactcggcatcatcactatactggatggccattgagttcaatttgggccttgtcgcaggctctctttcttctctaagggcattgtctgtttttcgccgattcggctcgagcgcaaactcgcgagacaagggatcgaccggcaataaatctcacgagcttctcaatatgaatggtagtgagcccagaaataccagggaaaggaagagagggttggggatggggacaacaatactgcaggatagtgttaacgagagccaggagcacattatatatgagccgaaaaatgaccacggacagcgagaggcaaggttttgatcttaattaaaaattcgacgcattttaaaatcaatatgctattttggatctttggtgcttgttaatatttcgtgacagatgaccttcctcttttctcgaccgtgccagagacggtttgggtatcaccttatagccgtatggctgttctagagcgtatacggagacagattgtgcaatatgatagatccaaatctacaaaacaatccagttaacattcactggcttacgcctgggcagatattccccatcttccaccaaggtcagcaaatggagattcccgattttgatcatcttctccggctgcgaagagtgcccactaccagcggccatcagcaacaaaccgtgccattgtccgggtcggtaccggagatgaatagcatagtacgtcccatgcactccgtagatctccgggatgagctgtttaatccagtaccggagatccccatgatacatgctcccttggggttggaagtgctcccgttcaacaatatgttcaggcaccgacagactcaaatcgacaaagcatgtcatgtgcttgatatcgccatactcgctatcggatgagaagaggatctctacctccggtaggaacaccgccccgtcgccgcgaacctcccacgtcgatacggacggatggtccgccatctccaagcgcggcacatacaggcgtcgcgcctcggagatccgggcccggaaggggagcatagtgccccggactgtgtcctgagttttcacatcgtcgacggacgggtaatccgccagaacggcggtgatgaagaagctagagcccagattgcgcgcgacctcctgcacgaaggcgagtgggtactggtcgaagacgaagcccggtttgttgggctggcgctgctccggcatggcagtggcggaggtataccattcggtcatgccgaggacggacatgatcgcctgcgcacggctgtggctacagtaacggctggtcgctaagaagaggatctgctcgcgcttgagctcgtggaggttgttcattcctgtgcggtggaggaggtcgagtacttcgtggtatcctgggtgaacaagtggcttccagcgttcgagaaggtggtctgctggggtagttagatcgttaagtaccctaatgagtgtgtccttgactcgtccggcgagggagacgagcgtgttgaaggcgacgagggccccgttgtcgcctatcgtgaggagttcgaggttcttgttgcagatccagatgtcagggcgcagacacacttcctgcagcgtccacagggagctgaaccagggcagggtggtcatgtccagtgagaacagccccgtggcccggatctggtcgtgcgctttccacggcgggatacgtatgggagactcgtccccacttgagaactggaggtccagatatacggaggacatccactggatagcgctgcgcatgccgtcccaggactccggggcggaatcggtattccaccaggcgatggcgtgtttagcgctcttgaagatggatgcctggcacgcaacctccatgtacatggcctgccgaagctcctcgtcaagctcctccccacagccctcctgcggaatgcacaccagatcaaaccagatatagggtgtatccgtgggaatctgcgccaggatatctggtagtcgctcgacatcaaacagtgagttccgagggatcagccacggcacgtgcggtttcatgtcaaccccaggctgatcacgctgccgccaccggccccaggtgtgactgatggctgtgtatgggatctcgaaatcgtattcgtcccacagcgaaaggacctccacggtcctccgctctttcacatcccacaagtaaagcgggaacccgcagatctctcccagccaggggcaggagtcgatactggagccggcgctgcagcgaggatccttcccaggtagatcgctgctccccagaacccgtctccctgcgcgccagaccggggaactctccgaccggtgagcgagataactccccccatctggggagtatggcacttgagctggctgttgggtgtggcttcgcggagagcaagcttcaatcgcaatggttagacaagcagcttcctgcgccatgtcccgccggaggctcaccaactcgttgccgcttcggtgtattacgaagttcccgaattcagcgttgaacagcgttgacatgcactggttgtaaacgcagttgaagcggaatttgtaccggatcccactggcctggtggatcgtctcgcgctctacatggttttgtgagtagaagtgagactcgtcgtcgccaaagaggtcgtcgtcattatcatcgtattctgcttctgcttcatccacaatacatattcgggaacatgttgcccaccatttccagagaatgtaaaacgatcgtacctgccccggggtaagatgttgtcgcagttcttcagcacgatcatcattaaaccccgtgatgaccgtgccgtcggggctttttatactgtcgactgcgccctgctccagagctagtcgatacatgatcgagaaacacctgctatacccgtctcccatgcccatgtcctcgccgtagaccacctgcatcaacgtggcgaggggatatcccttgtccctctcggggctgcgcacgggcacccagtcatcggggctcatgctgttatgctgaattttctgtctaatacaagtgtagataatagcaagacgctggtagtagtgtttattcgtaaagacgagcgacgaggtcagaagcggggttataatagaaaactaagcgaacccactgttctgctattggctgtgcttctgctagtacgagatcaaatttattgatgcagatggaacgaatataagaaagaaaaaaaaggctaattctcagttgcactcgagacatcactccagccaaaccaacgactaccggctcaccaagcgctccaagcaatccctcccctcctgatgccgcgcgtgatatgtcgcaataagactaactttcaccgtctcagccccatgtctcttctccccaaaaagaatcgccggccgatccgccagataatcagcgaccttagattccgtgttcgtgttccgtccaaacgacgtgtagcggacgatatgcatcgtcaggacaatgtatatctggtagcaggtccacgcgtactgaaccagcggcggcatccagagagtcgaggccagcaatcctagcggaaatagagcagcgaaaagcgctataatgctcagctggagaatctcccggggtcggttccggactgggtggccgtagtgtcggaagaactgctgcacgagggctgggagacctgtgaatagcatgaggtcgccgccctgagattggggggactgcaggacgaaatcacgaggtggttcagcttcggtggtcggcgtggttgatggcgatgaggtggaggatgagacaggggtgaggggctcgtggtcgagggcgaagaaggcgctcaggaggcggagcagcagcggggctagccaaatgagacaccagagtgatcggccgatggcgtagacgacggcaaagagaatgatgccggagagctccgcgattaagatgctgaggtaaacgtgccagcctggtcggccgcagttctcgcgcacaaaagccatctgcgaggctttatcttctgccgttgctggagtgaagatgaggtggtagacggcgactttcgctcgtaaggggatgcggccattgtcggtgggcgggaggatacccttctcgatggcagcgtccgtggctggaggggatagtcctgccagtgatccaggtttttcggcgggtataggcatgtaatgaagagctcgcgcccacatgcagttacgagctgcgcggggctcggaagtagctgtaccgcaaatggtgtaggtccagtctgtttgctcaaagaacgaagtgcccagcatgtggccttcgtgggcgcccttcaagagacctcgggcgttggcgatatcgaaggtgctcagagcggctttgtgcaaaggaccccccatgggcatcagaagagccagggttgggatggatcgaagtgtgatgtgggagaatgatcgctggggccataataaggacgaaaaccagatttcggtggctgcctctgctccgatataaccaagcaccgcaccaaaagcgccaagaaccccaccttggtcggacatatcgccaagcgagatgatttctggtagcaaagggttgtggtcagatagaactcacttcttttgtccagatggccggacctgtcatggcaatggacagatctgatgacatggccgagttttgagttggccggagacctgctgagctggctagttgagtcggtcagcgttgtcacgctgatctaggcttacatgatattcagccgcaagatggggttgtccaaaaacccagctggccaagggttattccattatggctatattgttttggaagtgttcatgtggaatccgtcttccgatttatcatgtcccttgaatcggggaatgacagtaaatcagtcaacatcatccatgggtgccggtttggttcgggtccaaaagctttccaagacgggattaacactacctagcaggaaggccacttcatagcttaagtcccaagcgagctgggcgaattgatacctgtcagaatcctatgccttcgaaccagattatcaactattcctaatattgcagggtctccagagtaggatgactaagcagtcatgtgataactataaaagcactccggaggcatagatagtaacgcagacacctttccaccttttcattctcagtaccttatggtgttctactctctagcaccctaatactcccagtgacgactctactctcacacctgttttgcacgcagggctgtcctgtccccgtgacagggtcccctctttactatactagggccaaaggtcacctgacccaatggtgacaataagaaataaaccgtcttgccatcccaccacggctatagttcataatcctcagttgcactatcttcccctctgttgccaatcaggtacatacgaccatagggtgtggaaaacagggcttcccgtccgctcagccgtacttaagccacacgccggtgagttagtagttgggtgggtgaccaccagcgaatcctcactgttgtatgttttttttttttttatttgttggcatatgtgtgaagtacagcaatagcatgctcatcttgggtcctgctgtggccctctgtacggagttatctttaagaaatcacgtattttaccaccgcggggtatcaatgactaaaagccgagctcttgtaatatgggtgtagacaagaaatgaagatccgatgtctttctgtatgataaatctcatttacaaagtaattaatgctgtctttaaaagcaacaagcattgttacatagtggtcacatatttcctcggaagaaacgaatttattggtccatttctagtggcaagtggggctattgcctcaatcctcaggcgcctaccttccgttttcgggtagcggccgttcgaagtacaacgactgccaatatgatattttggtttccatatcttttgtgagagaaatgagaggggagaagagtgtgcgcatgaaaataatttactcatcgttgattgggggataaaaagagtgtggagaagaggaaacgaaatgaagaggtaaagccacgatgttttgggaaaggagaaaaccaaaaagatgacagttaacgcggaaaatgaataatggagatggaattgaagtgaaagggaagaaaagcgaagaaaggaatagcctcaaagatcatgagaattggatttggggggggggaaagaggtgggaacaacttcaaatcctgttgaggaatgaagaggaaggtcacggggaaagcgcaagaaacttggaaatagcttcaaccgtgagccataggattgggaattgatgtgggagttacctcagaaaggcagggatagcctcaagaatgggaaatagacacaattacatcggaactctgaatagcttcatgattacccaactgagaagaacaagattcagccaatcaaataactagaaagattcaaaaaggctctgttatgatgaacaggccgggcagttatttcaccccaagccccacgtagctcagtggaatatgaccgttggtgcagtctctgggcccaaggctgtaccttccgttgaccgccagaacctgtgagagcgtgcgttcgagccagggcgagttctcaaagaaaaaaggaatcctaacaggtgttggcccgcctggtcccttcgtttggggtaggaccgagtcgagattcgctaacaacgcacgtgtatatatcccgttaagcggttggtttagacgagtagatctgcctatcacttgtgacacaaaattggggaaggccaccattttttttctcttttttaaggaagcaaatgaagttgtattgattctctcgcgaacccacagacccgcttccccggattttgtaatctccccccgtgtaccaacgaatcgtgccactacgacaatgggactttttctctaaaccatctcttactaataataagctgttccaacctggttccaagacctttggccgctctgccccttcgcagtacgtgtgaacatctaccttcatccatgttagcccgcgactttggtaacccctgtcgatcccctgccactacccttccgttttcgggtagcggccgttcgaagtacaacgactgccaatatgatattttggtttccatatcttttgtgagagaaatgagaggggagaagagtgtgcgcatgaaaataatttactcatcgttgattgggggataaaaagagtgtggagaagaggaaacgaaatgaagaggtaaagccacgatgttttgggaaaggagaaaaccaaaaagatgacagttaacgcggaaaatgaataatggagatggaattgaagtgaaagggaagaaaagcgaagaaaggaatagcctcaaagatcatgagaattggatttggggggggggaaagaggtgggaacaacttcaaatcctgttgaggaatgaagaggaaggtcacggggaaagcgcaagaaacttggaaatagcttcaaccgtgagccataggattgggaattgatgtgggagttacctcagaaaggcagggatagcctcaagaatgggaaatagacacaattacatcggaactctgaatagcttcatgattacccaactgagaagaacaagattcagccaatcaaataactagaaagattcaaaaaggctctgttatgatgaacaggccgggcagttatttcaccccaagccccacttagctcagtggaatatgaccgttggtgcagtctctaggcccaaggctgtaccttccgttgaccgccagaacttgagagagcgtgcgttcgagccagggcgagttctcaaagaacaaaggaatcctaacaggtgttggcccgcctggtcccttcgtttggggtaggaccgagtcgagattcgctaacaacgcacgtgtatatatcccgttaagcggttggtttggacgagtagatctgcctatcactcgtgacacaaaattggggaaggccaccattttttttcttttttagagaagaaaatgaagttgtattgattctatcgtaaacccacagacccgcttccccagatttaaattcccccactgcacaaagtttccgaattattatgcttaacaagagcctcaatgtcctcgtttatcttattatagccaaaagccagtatatatatctttctcttcaatcccaatgacaaccaagtcccttccggtaccataaccgaggacaagagtggctttgactttaggtatcttttatacggaccttgcatacaaaatgtacttgcttccttgtccgaaatacctgttttaaaaaaagtaccagttaaaagccagcttaatagaaaatattcaccttgatttgttctggatgaccaacatttcctttgttgactgtgtatttattgtattgttgaaatgagtatacatacccaaggcagaccgatttgggaaggaacgctgtagagagcacctggcccacgtgaattgtgctctctctttcctcttcctcttcctctctccctgatcatctttgtcttttgtccccagcttcaaatcaacgagacatcagatctgccctctcgttgcaaaataactctcctgtcccctgtacattttccgtcctcattgaggttcgaattgtatctcggctgtttccctcctgtctcccaagcatcaccatcccgacttacgtcgccttttacggcctcagtgaggatcgttatctcattttcggttgataacagtaaggtctcttggcacgtttatcctcactgtttggtttactgaatattgaaatagaaatgacatccgctcccaacgtcccggatttctttcgccgtcctcttggagctgattagcccaaggagttgcataaacaactcaaaaaaaaccgccattgcatgattagcattagagaaaacaacgaatacatccctgccgcattgagaattcgctttaactcccagcaaccatggctagattttcaaattgacaaggcgcacgtcgttttccccgccacatggacagacatgaagttggtcctcaagggtacctccattcagtacgataccttcattcatacacgccagcagtctgcaatagaagggaagaaagattatcaagcgtgcttttttgagttaagcccgtctgctagtcctgtattcgctggtcctttctgggagttaaaccacgaccaatcagtgcgatagagcaaactccaggacattgagtggcccggaaagaaagtttatatctcgattgcatttccaaacaactgctttaatgaattctagaatatacaggcctacatggccaagctggtagagcttgtgcgcagaaatcttcacacagacggcaaactacgttcgttttggtacgctgaacagaaccctcttccagaaggggaaaaagcaccacgcaggcccaagatgccctagctcttcgataatgatagccaataccatgcgtgggacacctctgtcgacttctacctggatgatcaggaccgccgttcgcgactactggaagccgcaatcgtagaacaacatattgagtgatctatctacaatgatgttttctgtaagggcaagactcacgatgtcatattcgagcgtgttgggccaagggagattcactggaaactccatgtctggatgtataccaatcaaaaagctagccccacctgaagccacccgagtggagtataaggtcgacatctcaagtccgattcatcgaaaaaaccaaaagctggtcactggcgacggactttgcatacgctctagccgtgcagacttcgctatcttgactcgagcgcacttcgaccctgctttagacggccagaccaggaagattatggctactgtcacaataaatttgaatggagtgggtcggcaaggagaccgtggaaaggcctcctcctggtatggactgtaagctcctgagccctcggttatatgttcttgatgaatttgaggccatcgagtagtcatctgcgcgattaattggtccgtctcttgtgtcttctggatctcggaagtcggttcgggacgatctatcccaaaacgttccaaattatcttcacggcgaagggattcctctcgagtcacttgtttttcagattcttctatatgatgggatggcggaccattcgcaaggtgtagcttacacctcaggccaaaggggtggcacgacatagtaggttcggcccgggccgacgggaaagagaatgcgcatctagacccactaatctgaaattttggtaccgccttccagattgggtgtgaccatggactttgccatgatttctgccttcttctggcttacatagtgaataaatatccaatttgatcagaaaaaaaaaacacatattctccctggttcagatgtttcgaagtgcacgctgactctctgggcctgtgtaaggatgggctttcaatgcgtttcaccggtcttcaaagtgagcgagtagtattccagtccttccagtccacgagtactcccattcattattctgagcactaaaggtgaagtgctcgatttgctagactgaagagagtctagcgatggacttatagcgctagatagaacttggaatattgtgcttgcgaataccaagccacatccagccggtactctgtgatataccccaggcattagaagtaccttgatttaaattcttcttcggtaccagcagccgtaacggcattactgttcagctcaggagtaatgacccatcttctagagtagcaagcagtagtaaccagggtgaaaggggcacctggctcaaggatacctttcagagtaataatactcagacccctcgaccgtttactactatctaggagaaggtggtagtttgggaatccgtggcagaagatcagaagcaggagtgacgcttcggttcttttagctaactccgatgctcgcttcgcctcgtaaaggaatcgctcgatcatatcacttgaacgaacgacaattatatcggtcaagtgattctggtatggcatctcaccatcaaggcagattctgcgcaccttgtacaggttgctatgtaggtagggagcgtatctctgcaccggcttctctgggacggctgctgtgagccacgtctgtccctagcggttgcctttcagaagacggttgaatgcatagaaatcggagataaaccacccgtctttgcatgggtttacgctgcccatggatggatgggtagcggcgaggacgattgtatccttgtaaatacaaggcaatgttgatgatgtgaattttgaaggcagctttcctgggattgtatgtgatctccctcgaccaaaggctctttctgcgccgaagacgccattatttagtgatatgaagttcgtaactcagagaagacggactatatatttgggttgggcgggaggtggtggttaaggtagggccataaggccaatggacaagagtttcgttgatggttacagttttatttgccatcatcttgatattgttgttgatttgaaaaacatcggggtggggagcaatgccgaacaccagaggagaagtttgatagacggagacgaatagagagcaggatacgctggttctttgaccgatcattgttgttgttgagtgggatatgaggcaacattcgaagttagggagggtataatgatgaaatataggattgaaaagtgagagaccaggtaactgtgaaagagaagtaaaaaattgaatgaaaagtgaaagaaaagtaaaagagaagtgaaggggagacttaagagcaacctgcccactgatgacctgaaatgaccagcatcggatctcgagactcaagtagcttagagctataacggcgaagggaaagagaaagaaccatgattgagctaggcagatgtgaggaggagggagaccgtgtgcgagtagaagtttgcaggtagaacatacacttgataaaggcgacgtctcggaataggtcgaccgagagactgtggaaagagccttcgattccttatcgaagttttcagtttccgttgttctcactattatcaaaatgtaataatgagtatgttcctgtgctcattccaaaagctggttgcatatctcgccggaatcttgagggtgagcgtatcggtccggcatttccttcgcgacaccactgccgagatatgctgaaaacttgcattcgggccgatgatagcagtttaaggttaaatacccggatcacgtcacctgattctgactgtcaggactcatatcttcctttctctccttcttctcccctatacacacttagctagcagaatatagttcattgtattactcgctcttctcctagcctcacagcaaatagtaagacaccgttgcctttttgagtaacacctgaattgccgacgctagagaacgaagcgaggtacccactgccatctcaagtagtagttaaggcaagagtggattactaaatttctactagcagagatcgccaatcatttcaaagtcgcgattggccgcttcaccccctccccgtatgcatcttccaatgaaaagatggctatgactagtgctctagcaggcaactccttgtcatttagttcagtacctgggggaaatgtggaagtggaaataatgagtagttactttgtgtaccttagataagcatcgatttaaaatgagtcgtaaattccccatggggaaagagttctccagtgattccactaccaatgcttgatcgcgactgagatgcgcacgcggtcgaaacgaaccttcgggttcgatgtcggggttctcaaagtggatccgaagtgactaatacatgtagttagccccgattatatttgattggtcgaaggagcttccccttttactctagttgtggcttagctcgacatgttaacctataaaacactttcggggctgagacatcaagtgcatcctcagggggctgacatggggaccgggtgctaaagatcgtatgagctagtatcagagtaatcttaaatcttcctcctttcaattaaaacccagtcattccctcactctccacacctccacattcttcacaaaaatttcaaacccatcactccatactcctcaccaaaatgacattcctcaagacccttcttctggcggcgaccctgtcagtcgcttcaaccgccgaaaccacctgcccagcaggctggctcctaaacacctggaccgtcacaagatgctgctcaggcaccatggtcgtcgacgagcaaggcgcatactgctgcgtcactgacatgagagcttacaaagaagcactcaccaacacagccttgctctacgagacggccaccacgaccagcgacaccaactggtccacggtagaaaattcttgcgtggcggaggtccgcttcacggctaccgactactcggcccaggtctcgtcggcggcgagcaaggctgaggctactactaccaatgattcaacgagcgaggtaacctcaacgagcactacggcttctggtgctagctctggtgcaggatcgcagacttcgacctcgattccgactgcgacttcgactgcgacttcaggttcggcttctacttcaactccgacttccacttcgactacgacttcgacctcgaacgcggctatgccacttgttaccggtgaagggcttgtgctcggtggtgcggcattcgctgctgcccttttcatgctgtgatgaaatgtgatttttttgtgattgaggcccccattttagtttcagtactatatatgtacgatttcgaactgaacttaatagtacacacgagactagattgcatgcacgttgatcgtatttactgtaatgacctcaggccgccagtcgggttcctcaggcacactactcagccgactatatacgcctagagtagtgcccaacagtattgaaatagtagaaaatgaattcaaaagccgtcagatctctccgtagcatagcagatattgcttgattcaatttccatacctgtagataaccccagttgtcctcaattgttgaatttatactccgtactccgcaataaagacagaaatactgacaaaaacaccgaattcctttggttggaaatgactgaatgcagccagaattgaacagcagtctcgactagcttcatgcttagtgacgtatgaatccttccactcaatagaccctattagtgcctttttacagcccatatctgatctcatttttcaagttatacgccttcgtgcattctgagtgcctttttgcaaagtactgtttcctaatcctgagctgaatctgatatacactggtttctattcattacgtttcaatgaactctaggactgttggataccttatgtatcttcctacatatacctatgaagttcagcaatataataaaatatcattgatcttactatacctgtatcaaagctacggagtgggtccagggagtcagggactcgggtgatcgacaacatacgatggccctacaacgcatggacccgtgcggctagccttagaaatgtggaatataggaagtaatccagttattgcttgtgattactatcctgctgcctagagatgacttgaaaataaattagtggcgccccctgaaccctctggtaccacacagagctttaaacccctgctagttctatcaaagaggtgcttccttacctaactccgcctctcatcctcattgctacacccagaccgatctatttacccctttaagatgcatcgtcttcgcgactccctgttaagcccctcgccaaaaggcttccccgacatcggcgagtcagatagcatctcttatgatcggctgaatgtgcggaaaagcctcgctcggggcgaaacccaatagatgcgcggaacagcccggttcaatcgaacctggattgtcacctccagatactgccaagttggagatggggtggattccctcgaactctacgttcgtcatatctggtatatgtactaccagctcggtctatatacgtcgcatgagacccccgaacacgaccgtctagtcctcgatatcctccggattcaaggaaagggaccgttgaccaggcctggaaagggggtctacggaatcgacatcgcccggatgaccgaaggcacgctgtgaaatgacctaccgctcttagtcggtgatatgactgactcttggatcaacgactgcggagcaatgtcgggcatccatctcctcaacttttcttctttcttggccaagttggcgttcacctgcgtctgcaaggatagaatgtgccaggtcgctctcgtcctatttcggcgcacgtttgaggagagacaggtgcttcgcagttctggtgatcctggtgatcctgatgatgaggatccacaccggagcatggattcactggagattaggcatttgttgccatctgccactgcgtggctccgggaggcagattgcaatatcctgcaactctcggaggtctcgtggaatgattgtcccagcgcgattggtaagggtggccgctgttttatcgagtcgaagctcgggaagcggtcgccgactggattcacgccatggagatggttgttctgactcaagcgaccccgcgaaattcaggaggcggcaaaagaggccaacgagaaaactctggaggaatctgctaccgatgccatccacgctatggtaagggtcgcggagaaacgaaactctgacattctgagagtttatcaaactgccggggatctcatctacaaggatgaaaatttcctgccattgaaaaagattgtggaggggaaatacccctggcgcgaggaaaccgaagacggggaagagaccgaagatcacgagcggggagaagacagcggggagagcaaaatgccggaagtgagtgaaaaggaagaggagaacgcaaatggcaattaaatgacactctctgcctctttctttgtgtttttagccctaccccgaccttgtgaagttggatcaaccttctcggctattcatattgaaactaaacagccgatagaaaggaacctggtagtctgtgagcgcagcgagctaccattgggacagctgttttatgttcagccaacaactgcgcatcgattaagatgagttccagaataattggagtgtacaatgaacgtgacttacgaggagattgaggtcgtaagcaagtgggagaaccgaaccctgtcgtcactattcaagtccattcacacaatcaccccaacccgcgggccgtatcaacaccggaattccaaagtctatgggaatttaataagaaaggagttgatgtgtctgagctttcgagattcgtccactatgaactagaccgcgagcttcgatagctcgaagaaaaagaggatagtggtagataggtgcggctgaaattgtgagtcatgtgatcatgtttgtgtagaattctgccttttcctctctactatttgtctcctattctcgtcataatcaacacagttatactgctctcgttctcctagatttacgttctcatagactcttcggccccccatccagacccacttgagcggcacaatccagatcacgtgcccgaagatcatccaaccccacacactttcttctactacactcatctctcgcatcacccaatagccaactataacccgattccttcctatcaacacacacaaaaatgcttcgacgcccacgtgaagcccagcctgatgccataacctccgaaatcggagcgatccttgcacccctggatatctttccatggggaccgcttgcaatgaactaccttggcgttccgattgtactaggagtaagttgccttatcactggtctgcgattcaaccatccgctaatgcactcttgtagacagctatgatcgccgtacacgataaggactatcagacagcatgccagaagctacaagagtccgaattccataaaacagtccctgaccgcagacctgcccccgagctactggctcgactcccgaatccagataaggtcatgagaaaggttaataaaaaatacgaacgtctggataaatcaaccactatcttcgactatccagccaaccaccacctagccgtgggtctcaagttgattgtggtcccgaattcttttgcaaatcttcccatacaggatgcggctagcgacctccctacaaaaaaatacgaagtctatggcaatatatttcacccgcttgaagaggcgttgattgagagtatggctaaaggtgttctcattgatgagaatgaccaaaatgctcctacttcgatctggggagatacattgagtacttggattgcgatgatggtgtcataccttgagataaataatgatattcttgatagctgccccgataagcgagccgtggaatggttcagtgggcgctatggtcgaatacacgaggaaaagttcggcccctgggacagacgtgtctcaaagcgactgggctctgggagagaaattcccgtggatatgaggggcaacctgctggctgaatgagatatacacgattagactccttatctataatacgcggtgggtaaaaataattcatttatatcgatatacttttgaaagctttcaaaaaattgaccaatgaccttattttgtcgatctactaaattactcccatgatgcatacaggctaattaaactacatggagggcggatattcaggtagcactgatattcgccgcaaaagaaacccccaagtgcagcctcaaaatcctatggctagcaatatcgctggagtgtgccgtcaggattatagcgggcgaaaacaacggagacgaagcatcatctagacaaaggaattgtgttttattagtcacttgtccgaggagaacaaaatgctagaatcgcaccaatttccaaagatagcctggcatttgataacctcttccaggtcacttcgcagtttgggctttctctgcaaaaaggttgccaacgcatcttgaagttcctgatcacggtcgaagtcgagctcaggtttcccagggatggcgtagctcaggaggttctccacatcttgttgatcaactgcctgtttagcacctcggcgttggtattgtgagagaatcttctcccggatgatccattcagcgctgaaaatcttaaccgggtatccgttgatttcctgtgtcactcgggtcgcggactgaaggtcgtactgaggtctgttgggccagctagcataatcaaatatctcgagctctataagacgtaccgcgtctccaggcagttggagtttaaatcccgggatggtatgcccgaactgattgaccgggccaaagtcagaggggaaagatttcaagagtatgccggtaaggaggtctgcggtgatggatcggtggtcgacctgaatcaccatatcgatatcctccgtggctctctgcggatcaggtgccatgaggcacacgctagcaccacccatgatagcatagtcaatctctagcgagtctagccgttgcgcaacagttgaggcgacatactctagctgtatctgcagaaggatgggcatgtcgaaagttttctctaatgttatagtggtcagatttcttgtcccttttatgtccagagtaactgctggacaaaggttgtatgagaaaagaaaccgatttaatgagatacgaacagagaggaagagcaggagagcaaacccggtggacggcaggcagaaaggctgccccgcactcgatcagtaccttagagcctcctagtctaggcaggtcatcaggtgtagctatatgcactttagacacatgtacttaaggtattcgcgtggcagggcctatgttagagacttcttgtatcgataattcttatgtaatgcgagccaaagaccatttatctcgcaatctcccctattaccagtcaatccctcgatccgtgggttaccagattaaccgtgaaacatgcatgcccagctgtatctgtcactttggatgtctttttaatgtctgattcccttcttggccctatcaattaatctggattaagctaagaccccaaagaaagatgaaggttttcttccgatccacttcgacccgctaagatcccggcgctacctggtcaattggtccattaattcttcttgcagtaaacacgactcttatcggcggttctgtatgctgtcccgcgagtggctccgtgcttgctgcatcccgtaacttggttggattgaataccgggtggacgttaatcgacggtggtagccccagcttgtaaaaagcagttctaatatttagatctcgtatgtgacgatgaacttgacctattgtatagtagcaatattagtacattaataaattgcaagcatggtacatataatacatacctcaagttatctacatcctggcccctaaagctcacatcaagggttagccggctccaaggggggttagaaagcaggatgcggcaaccacatcacttccaaagtcgggccatggcattaatctgccattaaatgccaccatctggattgtactgccaatttcgtgggttcaccctacttggagaggtggcaaggttcgagcagcatttctcgggctgctagagggattatgcgaggcgttccttttccaaatcggttctgttggtcaatggacgtgatagtctagtgagattaaaatgttagtatcacgcgaatcccttcggactgtagctcacaatatttgaggtgatggaaggtacatggggaagaatgggatgatagcgaagattctcaccccatgctcagaaattcacaggatgttgagatagcccatgccgagtgtgatttctcacttgatgtacctttgaagatatggcggtggttttctagagaagaatggagacaggaagagccctatccgccttagccaggaagtccgcgtctgtgatagccaggtctatccaatgaaggaagagtgtatatactcaaaataaccaagatagcaagagagaagaagaagcaagtgaagaagtaagcagtgtcttgcttatataaccggcaaagcttgcaagccccaaacctctcatttagctacctagtaagcaaaccatctatgaaggcaaacaaccaaggttttcttccgatccacttcggttcgcttagaggaactatgtcgatccgggcgctactccatctgtcaaggtggggacaagcggttggaggggatctgagcagagaatgagtaggatttgcctcattaacgctgtcataatcaaaagtttaagttaatccgtgaactaagacgattggattgccgtagaaggggcgcggtactaaaaaggaatcaagacatgagggtcaaggcagacacgcaggccaatcaccaactatactcggtcaacaaattaattagagttcgctctagtatcgggatgtgataaggttaaaattgaaagaaagaggcctgaagattcagcttagctcacattaaacttgaccatgtccctacaccctgactagttatacgacttatgggaagcaggttttcataagaagattagacttggaaataggttagacattgtatctagttttgaaaatatcctttttttttctgaaaagaatagctacaaacactcaagtgtcagtatcactgactttagagatatataattcccgtacgaacattgaagtaaaagagaagcggtgtatacaattattgtgctccatgatcattggacccatctccttgaatattcagctgaatgttttgttatggttcagcggagaaatggctggctggatggtttcccgcaattagagaaatggctggctgtactccgtattctctcacaattatcacgtgtttcatatcctcccacctacgtcgtcgtatattgcataatatttgtgctttttattggctataggccacagctatctatttgcacgagtaatgagcagcttgtttttttatcactagccggtttgaagcgcacgtccttccgcggaggagtgggaacccacatccttcgattcttgcccaacttcaagactgtatttatagtgatgacccggctagcccttattattgcgttgtctcagcgatccttgcggatccttgcggcaatccctggactggtggaagacctaccactggatactagcatggggatctaatttatctcctgcttcctatggactgatctgcacggggcgggaaaaatcatccgactaagcccgcgatccacctttccatgtacggatgtgtgtacatgaacgaatacaaagcgccccacaccgtgatgatccatctggtggggggtttcgaccaagcggagttggcttcgaccgatgggagctgagttttctcggccaggattcatcatcgtctattgcttggcttctcccgagaagccgttggttctgcgcatgcgaactagcccataatgtgacctatcagactgcgagaatcaatgagggaattttcagctgcatgctcgaaactagatcaacgtcatacctagacaaagaaaacatcttggctgctagcaagtttcagccacgctccgtgttttcctgttgtccgtgcttgaccgggtgggatatataaactgcgtcaatatccggtgttacatactattcaaataacttcgaaattcaaaatggctacatgcgattataccttcacacaccagcatgggattgttccttctgctcggattcctactggtcgggttgaccttccaatcaatccagccggccatatacccaattataagcgtctcaacgaccaacctgtgatcaagtcatgcgaaatccctctaggaatacacggcgtatccctcaaggttagcttaacattacccttttcgtgaatcaccgactgaattagttgaatttagctcaagatccctcattacgacatagtccctatcgatgcacctcccacatcggctgtcctctattcacacgctgatttcaaagcgaccatccagccggagaaagccggagataccaaagacttctatgagagatgctttgctgaagcagctgccattaacctgtttttcccggatgtacgatcggagaacatccgcatatgcatgactgcgtggctggctgcgaactgcgcggcagatgacacacttgaggctatgccacctgctgcggccacgcttgctttggaagagaccatatcgaagctccaaggaaagaaggcagacggtatgtaaatcaggatcagctgcggagaactctacagtaccgggctaatccatataatagtctccccgacaaacaaagtcgcatcgattctttgcttctttcaagaatattgcgtccagaaacttgacctcagcgaaagcacctcccgcgagctgagcaatgatatatgcgatatgtgcgagggcttgcttgacgagctccgatttcgacagggcattctgcctgggaacttggaaacttacctacaattccgcggtaaaacaatgggtatccatccattcttaactctgattcgcacactgcacaaaccaatcgagggcgactatctctccagactccgagatctccaacagcgggttagtttggtgctcgggctgcaaaacgaccttgttggcctggagaaagatcgtcggaatggcgagcctatgaatgcagtcttggtatccttgaaggaacaagcggggacggatgtggatcacatgaatgacatattgccgagaacgatcgatgaggtgtgcggtatccacaatcgttgtctttcagctgcggtggagatatacgaaggactccacgtttcattgaatggggatatccatgacccgattctggagactgcagtcctggcctttgcagaaacccatctgaaatggtgcgcatcgtccaaaagatatcaggcaaaggtagaataggtgatttattagactagtagttaatttctgggctcaataagatggcgttaaggtatacgattgagtttgtctccactttgtcagcctgcaggcgccacaatgtgataggtggaagcacgtgcagtgtagcgtgatagggctaagccgattttaggccgagaggctagagcgatgtggcaagccacatttcagccccatatacttcgaaaagcggcggtgaggaatgcgatgaacttgtgattggatagcggtgagtcatgcatgtaagattgtgacgagaaccggtcgtgcattgaatattcgaaggactgcagaatggtgtatggttcacgctactgcagacgtacttccaagactcagcattggttcagatagagctgtgaatgtggaactcggcccaggtctatcggcaagatacaagcatatcggcacagtctgaatacatgatcggttgggtccagatcggttgggttcagatcttagttatctaggaagcgagggcgaatcggggaagactgtcaagctctgggtgttgtatagcaaagaaattttaagtcaacttgggaattgggacactcacacgggtgttttctccttaggttcgaagcctgtttcttttgatgtatgcgtccagttcaaggcctatctcggcccaataaaacacgctccctccttggcaatcttgccactatctgtctctctcaccagcttcgttcaggtcatggcttttgcttcccttccattatcacgcccgagcatccatggagattcctatgcagattttatatttggcctagcactaacctttgtcaacattcaatatattgccgtataaaccatgatgtctacgtctttatctgtggccaattttcttctactgagagtatagtagacatatcaaaagcgaaaaaaaaaaaaacatacaacagtgaggattcgctggtggtcacccacccaactactaactcaccggcgnnnnnnnnnnnnnnnnnnnnnnnnnnnnnnnnnnnnnnnnnnnnnnnnnnnnnnnnnnnnnnnnnnnnnnnnnnnnnnnnnnnnnnnnnnnnnnnnnnnnnnnnnnnnnnnnnnnnnnnnnnnnnnnnnnnnnnnnnnnnnnnnnnnnnnnnnnnnnnnnnnnnnnnnnnnnnnnnnnnnnnnnnnnnnnnnnnnnnnnnnnnnnnnnnnnnnnnnnnnnnnnnnnnnnnnnnnnnnnnnnnnnnnnnnnnnnnnnnnnnnnnnnnnnnnnnnnnnnnnnnnnnnnnnnnnnnnnnnnnnnnnnnnnnnnnnnnnnnnnnnnnnnnnnnnnnnnnnnnnnnnnnnnnnnnnnnnnnnnnnnnnnnnnnnnnnnnnnnnnnnnnnnnnnnnnnnnnnnnnnnnnnnnnnnnnnnnnnnnnnnnnnnnnnnnnnnnnnnnnnnnnnnnnnnnnnnnnnnnnnnnnnnnnnnnnnnnnnnnnnnnnnnnnnnnnnnnnnnnnnnnnnnnnnnnnnnnnnnnnnnnnnnnnnnnnnnnnnnnnnnnnnnnnnnnnnnnnnnnnnnnnnnnnnnnnnnnnnnnnnnnnnnnnnnnnnnnnnnnnnnnnnnnnnnnnnnnnnnnnnnnnnnnnnnnnnnnnnnnnnnnnnnnnnnnnnnnnnnnnnnnnnnnnnnnnnnnnnnnnnnnnnnnnnnnnnnnnnnnnnnnnnnnnnnnnnnnnnnnnnnnnnnnnnnnnnnnnnnnnnnnnnnnnnnnnnnnnnnnnnnnnnnnnnnnnnnnnnnnnnnnnnnnnnnnnnnnnnnnnnnnnnnnnnnnnnnnnnnnnnnnnnnnnnnnnnnnnnnnnnnnnnnnnnnnnnnnnnnnnnnnnnnnnnnnnnnnnnnnnnnnnnnnnnnnnnnnnnnnnnnnnnnnnnnnnnnnnnnnnnnnnnnnnnnnnnnnnnnnnnnnnnnnnnnnnnnnnnnnnnnnnnnnnnnnnnnnnnnnnnnnnnnnnnnnnnnnnnnnnnnnnnnnnnnnnnnnnnnnnnnnnnnnnnnnnnnnnnnnnnnnnnnnnnnnnnnnnnnnnnnnnnnnnnnnnnnnnnnnnnnnnnnnnnnnnnnnnnnnnnnnnnnnnnnnnnnnnnnnnnnnnnnnnnnnnnnnnnnnnnnnnnnnnnnnnnnnnnnnnnnnnnnnnnnnnnnnnnnnnnnnnnnnnnnnnnnnnnnnnnnnnnnnnnnnnnnnnnnnnnnnnnnnnnnnnnnnnnnnnnnnnnnnnnnnnnnnnnnnnnnnnnnnnnnnnnnnnnnnnnnnnnnnnnnnnnnnnnnnnnnnnnnnnnnnnnnnnnnnnnnnnnnnnnnnnnnnnnnnnnnnnnnnnnnnnnnnnnnnnnnnnnnnnnnnnnnnnnnnnnnnnnnnnnnnnnnnnnnnnnnnnnnnnnnnnnnnnnnnnnnnnnnnnnnnnnnnnnnnnnnnnnnnnnnnnnnnnnnnnnnnnnnnnnnnnnnnnnnnnnnnnnnnnnnnnnnnnnnnnnnnnnnnnnnnnnnnnnnnnnnnnnnnnnnnnnnnnnnnnnnnnnnnnnnnnnnnnnnnnnnnnnnnnnnnnnnnnnnnnnnnnnnnnnnnnnnnnnnnnnnnnnnnnnnnnnnnnnnnnnnnnnnnnnnnnnnnnnnnnnnnnnnnnnnnnnnnnnnnnnnnnnnnnnnnnnnnnnnnnnnnnnnnnnnnnnnnnnnnnnnnnnnnnnnnnnnnnnnnnnnnnnnnnnnnnnnnnnnnnnnnnnnnnnnnnnnnnnnnnnnnnnnnnnnnnnnnnnnnnnnnnnnnnnnnnnnnnnnnnnnnnnnnnnnnnnnnnnnnnnnnnnnnnnnnnnnnnnnnnnnnnnnnnnnnnnnnnnnnnnnnnnnnnnnnnnnnnnnnnnnnnnnnnnnnnnnnnnnnnnnnnnnnnnnnnnnnnnnnnnnnnnnnnnnnnnnnnnnnnnnnnnnnnnnnnnnnnnnnnnnnnnnnnnnnnnnnnnnnnnnnnnnnnnnnnnnnnnnnnnnnnnnnnnnnnnnnnnnnnnnnnnnnnnnnnnnnnnnnnnnnnnnnnnnnnnnnnnnnnnnnnnnnnnnnnnnnnnnnnnnnnnnnnnnnnnnnnnnnnnnnnnnnnnnnnnnnnnnnnnnnnnnnnnnnnnnnnnnnnnnnnnnnnnnnnnnnnnnnnnnnnnnnnnnnnnnnnnnnnnnnnnnnnnnnnnnnnnnnnnnnnnnnnnnnnnnnnnnnnnnnnnnnnnnnnnnnnnnnnnnnnnnnnnnnnnnnnnnnnnnnnnnnnnnnnnnnnnnnnnnnnnnnnnnnnnnnnnnnnnnnnnnnnnnnnnnnnnnnnnnnnnnnnnnnnnnnnnnnnnnnnnnnnnnnnnnnnnnnnnnnnnnnnnnnnnnnnnnnnnnnnnnnnnnnnnnnnnnnnnnnnnnnnnnnnnnnnnnnnnnnnnnnnnnnnnnnnnnnnnnnnnnnnnnnnnnnnnnnnnnnnnnnnnnnnnnnnnnnnnnnnnnnnnnnnnnnnnnnnnnnnnnnnnnnnnnnnnnnnnnnnnnnnnnnnnnnnnnnnnnnnnnnnnnnnnnnnnnnnnnnnnnnnnnnnnnnnnnnnnnnnnnnnnnnnnnnnnnnnnnnnnnnnnnnnnnnnnnnnnnnnnnnnnnnnnnnnnnnnnnnnnnnnnnnnnnnnnnnnnnnnnnnnnnnnnnnnnnnnnnnnnnnnnnnnnnnnnnnnnnnnnnnnnnnnnnnnnnnnnnnnnnnnnnnnnnnnnnnnnnnnnnnnnnnnnnnnnnnnnnnnnnnnnnnnnnnnnnnnnnnnnnnnnnnnnnnnnnnnnnnnnnnnnnnnnnnnnnnnnnnnnnnnnnnnnnnnnnnnnnnnnnnnnnnnnnnnnnnnnnnnnnnnnnnnnnnnnnnnnnnnnnnnnnnnnnnnnnnnnnnnnnnnnnnnnnnnnnnnnnnnnnnnnnnnnnnnnnnnnnnnnnnnnnnnnnnnnnnnnnnnnnnnnnnnnnnnnnnnnnnnnnnnnnnnnnnnnnnnnnnnnnnnnnnnnnnnnnnnnnnnnnnnnnnnnnnnnnnnnnnnnnnnnnnnnnnnnnnnnnnnnnnnnnnnnnnnnnnnnnnnnnnnnnnnnnnnnnnnnnnnnnnnnnnnnnnnnnnnnnnnnnnnnnnnnnnnnnnnnnnnnnnnnnnnnnnnnnnnnnnnnnnnnnnnnnnnnnnnnnnnnnnnnnnnnnnnnnnnnnnnnnnnnnnnnnnnnnnnnnnnnnnnnnnnnnnnnnnnnnnnnnnnnnnnnnnnnnnnnnnnnnnnnnnnnnnnnnnnnnnnnnnnnnnnnnnnnnnnnnnnnnnnnnnnnnnnnnnnnnnnnnnnnnnnnnnnnnnnnnnnnnnnnnnnnnnnnnnnnnnnnnnnnnnnnnnnnnnnnnnnnnnnnnnnnnnnnnnnnnnnnnnnnnnnnnnnnnnnnnnnnnnnnnnnnnnnnnnnnnnnnnnnnnnnnnnnnnnnnnnnnnnnnnnnnnnnnnnnnnnnnnnnnnnnnnnnnnnnnnnnnnnnnnnnnnnnnnnnnnnnnnnnnnnnnnnnnnnnnnnnnnnnnnnnnnnnnnnnnnnnnnnnnnnnnnnnnnnnnnnnnnnnnnnnnnnnnnnnnnnnnnnnnnnnnnnnnnnnnnnnnnnnnnnnnnnnnnnnnnnnnnnnnnnnnnnnnnnnnnnnnnnnnnnnnnnnnnnnnnnnnnnnnnnnnnnnnnnnnnnnnnnnnnnnnnnnnnnnnnnnnnnnnnnnnnnnnnnnnnnnnnnnnnnnnnnnnnnnnnnnnnnnnnnnnnnnnnnnnnnnnnnnnnnnnnnnnnnnnnnnnnnnnatcgcgcgaccgggggtgataagggtgagtgcactataaacggggtgagaatcagggtgagaatcacccaggtcgcgcgaccaccgcattgaccccttcagctgaaccaacggcagaatatcattggatcgtgttgtttcccttgaaacactcgatatcttggcatctgcatataactagaactggaagtatcacacacctaggcagtaggcaagttggcaataccaatcgatttggttaatctgctcaaaaagctatctcgaaatcgagctaaacgcactcggcgggacttatatcacgggccaatcagagctcagtgtaatttagatataactaagaagagaggttgggaggaaagatccaccacagcggctgagggactagtgtttataaacatgagagaatcttcctagctaaacctctttatgcagacctgtcacatcacaagtcagtggccagccacaaaagaaacgctaggaaggccaactttgaaagcggagggccaatcaacaacgtacaagtttggacgccacgttcagctgtatcggcacatatttgacccctacactgcttggcagaatacttgcaggagtggttctcttggttttctaacagatatcgacactaaccctcatgtgggctgtgcaaattgcctaatgggggttgcgcatttatgcgcaacccccattaggcaaggcaaggcagataaattacaccgatcaaatggcccacggccctttggaaatgactcggaacatggccgtccagtaatattatcccgcccccgatcggacattggtgaaaatcatctgcggctggagtaagcgctttgggatgactcgtgtgattatgcagcagatacattatttgtcacatctataggctaccccgcttatatcatgaaagtacaccacgcatatatacacaggtgcctcattgggaactatcatttccatccatctctttggactcaacaacgactatgtctcaaagcaaccgtgcatttcaattcgaaggcagcgacagtgattacatagcctttcttgagagccggctttcagctgccttaagccaaggaactagccaggcttctgttggcgcggcgatttcgcggagcgatgctccagcgaccacatcatcggattctcggccgactacttctacgactgtattagcggactctcaacaaggcactttagctatagcatcagcggagcctcagcctagtgactatcggaatggatgttcagtgtttcgggcttctcgtccagccagtcctcgtgcgactggatgtcctccttggtccactagagatgatctcaaaattctatattatgacccgatccgaaaccgcgacaacgatcttcccgataatgctctctccaggttgccatcctttaagcaaacatcggttgttgaggcccaaggcttgaaggagctcagacatttcattgaggacgttacgaggaagtctcattggattaaaaagaagaaagagcttggattatctcgcccagaaatcaaccaagataccattcacgcgctgtgtggtcgaccgtcagcctcaaacctgcgcgatgagtcaaacttatacccaaataatgaaccctcagaacacagcgccttgattatgcgaggatgcgactatggcgcgttgacgaaggatagaaaactgcaaggaaatcttctccttcacatcgccaaataccaacagctcatatttgtgtccttatgtgtcgtcatgcttgaaattggagctccgattgatagtgtggactggatgatgcgccgatatatcagtgatactagctcagcgaatctccggcggcttcgatatggatgtaaatgggtaaatcgttgcatgtctaagttgttagaacggaactggggttttttaagttgggaagctttcctgttatgttggtattcctatccagagtagcttcttgatgctgatcacctcaaaagttccccggtctatccaacaatacggacgatttgcatacacgaaaaacagttgcgaaaccttcgtgacagatatggggacgcccgatctggcacttcccttcgctgaggatgggctcagtccgtactgccttccttgtttcattaaagtgatcgccggcaacgacttaaagtatattaatctcatgaatattggtgaacacatgcttatttatacagcctagttgatatttgcaacagtttgggctatagcatcctactcgtttctccgatatacgaaaactacttcaataatgcccccctggacttcaatcctttcatacatgcatacagcgaacctgtcgtggatttcaatccattcacatatgcacataacgacccggtggtgaattttgacgccttcaaccaagtatttcccagtggcgcagacaatccatgatccgaggagggagaggaagaaacagaagcagcatgcaagctgacaggtaggctgacgagaatgaaaccagttgtggaagttatatgcaagaaggaaaagacgaaagaggaaagagtaacgcaagagctggccgctgagtaatcgactcattattttgtccgtgtgcgatcagcttaggaacatgttagcgacgggcaagcgctgagcggctttcctacatacctgatgatagggggaaccgcaaagatagccgcgagcctgggctcaacggttacatcaccatcgattcgtctcatcagaccatgcttaaaagcacctccgggttcgcttcgcgccgaatctgatatgttgcagataggtataatattgacggggccgggtaacttgtcccatttgaaagatgtgttccacatccatactgtgaagttccaattctgggaataaattagtaggtcgccattcatagaaacttccaaccatactggaaggccaactgttctgagaagaggcttaacgaaaggcgaaacctctttgtgctcatactctagatttcccttcccatcgtcttggaatttcatgccggaaagtgccagcgcgagggaatctagcaggctctttgcttcttcgccgagagatgagtctgtcatactgagctgtgtcagtacgcgatatcggcgagtattttcaattccggcggtagatctcaactgtccaacgtggagtcaaataacgcaataatgtgggcagatggaaacgtgtacctctgttttcaagcggaagaagtttggagcgaccgaggtgtggataaaagaggaattgccgtcgcagaacacttgaagatgaccgcggggtgaggggcactctgacgggtcccgtgaccttcggtacccatcgttcgacgcgggtccacgacaacctagtgagatcacagcccgaccagtggagatactatttggatgtcaaacatccgtcttgatccttagcatgctgatagtgatttttttctctactaacacccgacatttaccaagttggtattttgcgaacattttcccttgcatacattatccggaatttggttccaaggttataaggtatgcttacttatcgtttcatgcccaatagagatcgaccgcatatatgtggtgaatctccattaggcaaaccatctttcaccaaagtccagtgggaatgtgacatcactactaactaatttacaatgtacgggccgtattctatatcattctctctgttattttgctttagtaaaacccacaactcgatctctaggagtggcctagaaaataaccatcttaaaaccaaacctatgagaatttatgactcttcccttttagtcgctgcaacgaaaaccacataagatcaaggttttagattgatatcacaatactcggtattaagaacacacccacacgaagaagaaatcgataacaggcactaaccccagggctagtgccaagagattacttgatactgacaagttaaatcaaaccgaattacagggttttgattcaaatagctatcttagtagattcttccaactaatcacttgattggcatcaacatatgttcggagaagaaccagcccggtcaaacgaagctaacctggtgtctcaagatcatattgttcctttcttcgctataaatctgaacgagcctccgtcagcgcagaaagcacacttattcatggaccagtccagcccccaaacatctaccacgtcggaactcgacaccactcccatcaaggagaggcaggatgagccgtccttcgatctcgatccgccgacatttacgcctccattcccaaacttcaaccccgcgtggactatttgcaatgttgctagtacacaaggtctgtttagcttaccaaataggattggactctagctaaccattgcagtaccgattgtggttgtcacaaaattgggcgcaagatacgttgctatcccgtgtaccgaagaacttttaaatacttactaccaattattccctaatcggggccttatgttttccatcgctcaggtttataccggcatgatgaagatatcgtcccactcgactctccacagacaggcaggaatggctatattgcaatttcttaactaggacatacactactctattaacgacaccgacgcatactcagcaaaaatagcgaaacgacttcagacagatgtgcttgttcggatggatagagggcggatagaacatatccagagatatgatctgcctttaaggttaggcacactggtgactttgagggaggagtgcaatttctagttgattgaggtttcatggtgtgattttaccacccctggggttaggttaggagatatcacagatttactggcatgcttcaaaccataagtcggcgtttctctattgctccccgtctcgatttgtcggagctagtttatttctattatttcttccttctccagatattacaggccttttgctgtggagggttgctagggagggcaatttggcacagcaagggaagcgctcgatctgtatctataattggtgcattcatatcaaaaacggggtccgcctccaccgccaaggtgatgctgagaagtcggacttgcttgatatttaagctcgattgaggtcctattggtggcagcataagctcctctgcttctggaatgagaaacttcgcttgtattatatatatcccttgccctacatccggattgaaaaaggaacattaattgctttaccgttgcactattgttggtttatccttatattctatgcacttctgattatattctatgcacttctgcctctcatttctctacaattgaagttaggtataagagcccgcgagctatgtgtttagatctgtgctgacttgcttcgtctgcaaatagttcgagcctcacatctccattgaaagcaatcaacgcaccgttatataggccttgattattaaggttcgcgatatcattaatccaaagtgcatagatagaggctaatatagattatagtgaagcatcatgtgttttcaatacacctatacttatggatgtgaatgcgtggaaacagctccactatttccatgtgccgataaggtcaccaaaggtctctgcacaatgggagaagtgctaccaagaaaacagaatttcaagcatcaatatggcaagtatcgtatggctaagccttaaggtttgaagccagggcttattctcacttccattgatgagcacagtgaagctataaagaaattgatagtatgaatttgaataataagtcattaattagactagcaacatcgatacaacagctctctaaaattgctaagtaacgtaggaattacccaattaaataatcacttaaggcttttagaaaaggtattccctccttcatgctctttatagaccacaaccctctaatttcctagagttaattacatctttacaagaactcaccattttttcatcggattagcgcccaagtctgttttcgtgcgatttatattaaagaagccccaacagttacttatatttatcaattagacgaacctatagaaagctataaagtgtctcccttcccaggtaactatcctactaactatcccagtcacatggcattttacctcctcttctcttagctatatcaataacaccaataacacctaccaagcccctcactgcgcaattgctacaggttataaatcaattttgtatatttttctttgatccaacacatagcagatatgtaactaactattcagtccataaaatggataaccctcagttcatgattgaacacggcgatgtcgctacttatatcatctcttcggccccgtataatgataggcccattactaccgatctactatctggtattctttctcggcatataggatatgcccctccgacgttcattaagaatcttatagggtcaaatgctagtaatacagacttagaatatatggtcgtactatacagtctgctaataatggatatcctgccgcccagttccctacatacaccaatcaagcgtatactttactcacataatggggaggaccttatacattatcttatggataatttggacattagggtagagagccagctaggaaggatataatatctctgttagcccgactataggaatttggccaatgcatttcgagccgttgagatagtagaatcattaaacgcctaggggagatggttgttttctgtataaaatttgttcagctcatagttagatattgattctccgatgaatagagaaagaatgtacttttaggactattatctagtcaatgaatatgatgtgatggatcacgttatgagttgtgtggccttccatgctcggtgggagataagttcgagtcccatatctccattgaaagcaaccaacgctccattgtatgaaccttgattattgaggtttcgaattagaccccctccgttgcttactttatcaaattaggcgatcctacagaaatctataaattgtctcattcccagataattattctcacagcaagtcttcctattttcccttaaaagagagacttgccggtatgtccttatcttcatcgtccacaattagcatcatcaatgttagccaaggcctatctggcctaagggccaacgtaagccgtgttttcgtcatttgttaccaagaatataatgcaacaggcacaccactataagttgactcctagcagcacagccaatttatctaacaaaagaataaggggcaaagaaagtatcactagagtgaggcttgaagaggggtcactcactcccatgaatgattctcattctatcgcggctatatttcagaattcagaggttatccaagatatctcggacgatccacaaattagagggctgaaacttatcgtatacgagtaggtaatatattcttcttttatggcttaatgaccgacgaagtgataatcaagcccagccgagagtacatcaagtacttcttatctataagcacaagtcccccactcatatatccaaaatcagctaatgtcccagggcgttcttgatcagaatcgcagctccgcagtctgcctttataccaatctctagccatatatccctgccacaacacgtacaggatatcagcccatttgacgtatatgagcaatattaaatgctgtggatgcctcggtgccctagttaagcacccttatgatagttagttagatagttagatagagagctctctcttcccctaatacaaccttttttacttctatctttagtacctacactctgtattttattatataataattgatttccttccgtattctgatactttattatttctttcgattccttccatactaaatttcctagtacattccagtttactagttacttctaaatatttccataccatagctcacatatggttcaggcaaagattgggatagacagaagaagctcgacatagcaagccctttagggtcaaggtaaattgtctgtttagttacaagatctataaaatctgaaatattagctcggtaagaaggtctggctctttgtcaattatagcctaccattggacaagtggcggatatattttcctatatcaaaccgtactgctatagttagtgagcatataaacataaatgagcttctcttctattttgattgtattcatgcctctagataactgcaacaaaaaaggcccatggattgtttccctatactcacgctacaaagcctactgccgaagtgggttggtccttttttctttcaagacaatccctcgtcagtctggggagatcaagaaaatcgtaagttgcacaaatacgcgcaatgatagtattctcgctcactataaggtatagaggacgccgaatcagacagcatactcgagcttccaaacatcgaggttccaaaaatcatcaacttttggcaaatgccagacccttgagtaaatactgctgtctataaaggcatagagaatgcagagtcttctctagggccagacaatatccttgggagaatcgaaaaattgccaacagagcttatagattccattatcgaggctagtgttttttccgagccgcttggatcacatgatgccttacatactctacaagctttttgccaggaggagaagggctctatctttaaaactaggattcacactgttcttagaagcctttcgcttcggaagagatttgagactagttgggaactctaccctaactttgaccatacgaaggctcgtcagtgtactttcgataaaactgctctgtatgatttagccttaaaagcaattgtcgattgtccttagtgctttatgtttctactcgatcactaaataattagtccctcctctttttattaggataggtaaaccctctatctgattgcggtaaatttaaagaaccctgatttgatagagtggacaatgtctgcgatagagcccctcgacctccttaaacctatcttggtagagggacatatgataatattataattcactacctaggatgcctagttgttctagagctgctggaaacgtcttcgattaatacctgaaattgaattaatacttaggccaacggagataatgaatctgtgtaaatttgccgatatagatctagtaaatcagctgctataccgaggtgtggatcttagaatccctaatccaaataacggacttctgaattggtatcagcttttataccaataaaaccctgaaccgatgttatgttggttctggagccataacgaagagatcctagaagacctcttgacttatgtggcgagacgcaactgtgtggccggagtggtgtggatctcgaaccataccgaaagccacgacgactggcgctaagctgtatctgtagctgccgataaagtggagcgggagagcgctgaaatatttgaattccttatataatacccgcctccgggatatagaagggacagcatgggccgcacgggctgtatactctctgaggatcttttgatcacgatcgtcggtagagcgtgctctaagagttgtatatatgatttgctcctcttaggcgaatgctccaatagtgatatacaacgtttgcaaagcgataaagcatggttggaagaggttgctgctcagaagatccaaacaattcaagggttgaatgagactgtcggagtggttagcattaaagttcaagcgaggaaagccggtctaaagttggtgacagaagctctagagactttcaaaggatagggtagcattggtcattgtactcaatcaagttggtgcccaaaatatgtacccgaagctcattcaatccccgggtatgcctactgttgccggccgactaggcggcnnnnnnnnnnnnnnnnnnnnnnnnnnnnnnnnnnnnnnnnnnnnnnnnnnnnnnnnnnnnnnnnnnnnnnnnnnnnnnnnnnnnnnnnnnnnnnnnnnnnnnnnnnnnnnnnnnnnnnnnnnnnnnnnnnnnnnnnnnnnnnnnnnnnnnnnnnnnnnnnnnnnnnnnnnnnnnnnnnnnnnnnnnnnnnnnnnnnnnnnnnnnnnnnnnnnnnnnnnnnnnnnnnnnnnnnnnnnnnnnnnnnnnnnnnnnnnnnnnnnnnnnnnnnnnnnnnnnnnnnnnnnnnnnnnnnnnnnnnnnnnnnnnnnnnnnnnnnnnnnnnnnnnnnnnnnnnnnnnnnnnnnnnnnnnnnnnnnnnnnnnnnnnnnnnnnnnnnnnnnnnnnnnnnnnnnnnnnnnnnnnnnnnnnnnnnnnnnnnnnnnnnnnnnnnnnnnnnnnnnnnnnnnnnnnnnnnnnnnnnnnnnnnnnnnnnnnnnnnnnnnnnnnnnnnnnnnnnnnnnnnnnnnccccgacgactggcgctaagctgtatctgtagctgccgataaagtggagcgggagagcgctgaaatatttgaattccttatataatacccgcctccgggatatagaagggacagcatgggccgcacgggctgtatactctctgaggatcttttgatcacgatcgtcggtagagcgtgctctaagagttgtatatatgatttgctcctcttaggcgaatgctccaatagtgatatacaacgtttgcaaagcgataaagcatggttggaagaggttgctgctcagaagatccaaacaattcaagggttgaataagactgtcggagtggttagcattaaagttcaagcgaggaaagccagtctaaagttggtgacagaagctctagagactttcaaaggatagggtagcattggtcattgtactcaatcaggttggtgcccaaaatatgtacccgaagctcattcaatccccgggtatgcctactgttgccggccgactaggcggttgtttgctcagatgaccttaacaaagctttcctttactagttttcaatgcagcagtctgttcttcctgtttggattttggatattaattagtccccgaggtcatactatctcacgcttaactaagcagctataggctcttcagagctagggctttctcaggtggcggccgaccccgcagattcggttatggcgtagactaggcatcttaatgggaacgattatgcatttaaaataccgttactatgtcgagtactatggtcttcgtacaagtcaggccactatagataaactacgaacctctcatatttacgctagtggagtggaaaaaccgagtgaggaaatgagtttccggacaactctcagggtcaatacttatatttgctagttttatccagattcatatcgagaaatgcaactagaatcatctcgattcgaacatgccaaatatataaagctccatatctcgttgtcttgcctttctatccctcctcctcccagtttcaattacaactattctctatcaagctagactgttcgggcctagtacagggacgcaaacatgacaacagcgcagaacagatcgcctcgttacaataagctatctggaatggagatcacaggctttatggtgttttcagcttcctctaacggagccgacataaattccgaagtgaagcggtctctacacttatggccaaagatagaaaaagcccctttggtctatggcaggggagatactgacacatatacgcggtttttacagcgtgggaccgaggaaagcgacgtagtaggtttaccaaagagtatattaaaccaaggctgacaaatagaagttcactcagaaaatcaaggaggctataggcaaagttggctttacctatcgtcaaggccccgttatcgttatctcctccgaaaaacactcatagggcactaggcttacgcacctagctcatcctgcggtatctatctttcgggatctttcgaacatcgaaaaaaccagagtgacttttatgctatacccagaggatttaacaaaagaggaaacgcgggaaagccaaccagttaagcggaagctacggccgaacgaaatccttttcgtgaaaggatcagtcagaatagagatagaggttcctgctggaggctcctttatctggcaagggaacactggcgcaccaatagggcctgatatatacaggccagaggtttttgaattcatgacagtttaggcagctcgcgtcctagggaatcggtagtattagacgcggaacctagataaagaattgtattagtcataagatataataaaggatataagttactaccaatacctgatatttagacttaaaatagagaagtcgttatacatcaataagaatattagtatggctagctcttagaagctgcatggctttagcttcttcgataagagataatcggcagaaagtaggcaagaccggggcaaacagaagtgcaattccctcactaaactcaatctcaaaccttctaagctttcacccctattaaagagcactacaagcattgtgatcgcttaaccgccctaggtgatgaaggaaagacagtatcgaccagataccgcggacctgactcttaggatgtgcacagtctaatccttgtgtccatagccattcttcctcttctaaggctagagaagaccatcgaaggatagtttgtaggcacacgatccataagcgtaaactcgcaccacatgaaataaaatccacagctgtactagtttccacaatagctagagagaggtcggcttccaaaaaccttgaaaaatgttccatctaaatggataggtcgtaaagcagaccctccgcagtgactggtggattacagcgagctaacattgtcaatacgtgaaagtgggagtcgctcagataggttaagtctcccccctgccgctgactcagaaacctggaaggtgaccaaataggtatagtatagaatacatccccgcagggatagttggttactcagaacatagacccacccagactctgtatgatagtacatgcatgcccctgaaatgggtatctttgtgataagggctccaatatataagcaatacatcttgccagagaaccgcggatccatatactacccatcaactatagcaaacatctttgcgaaccgatccatgtcaaggctcaatatcttcacgctgctaatggtatatttcggggtctcaaaggtacaggcaaactctgtttagcagattaaaacaaattaactaactacttaggccaacactaaaaattacccaacagaactaccggattcccttcccttagggaacattaagactcaaccgggcaagatctaccctccgaacatacaaggacagccaagcagcccgccagacataagacttcatcatggtggagtatctattcaaggagaagatccaatgcgcctcagcggaggtcttagcgcttcgccacatagagcagcaagtgatcccgtgccaccaaagggaaatgttaccaaagttttatctatcaagtatccgggagctttagctttaagcaaagcaaagctacgtattataattgagtcacaagggaagcaaacaaaggggtagtacaaacataagaaattcgaaaagagtaatagtataaggaaggcactagaagaatttagacctacatggcgataaggaatacagcgtcataatatacagtatactcggtgaccaatacaggttaaatagggatataatggaaagagggcatgcattctaagctatactacttctagacatatagcgcgtccttagtacccaaatttgcagctaaattgccacatttcatatcgccgcctcaatactgcttatattcactggctaaatcaaccgacataccgaatagtcttaacagatttaacaaataacaacgctggttaaggtctggggacagaataatatctttatagggtatacattctgagctatactattttaggataatatggcctttagacattttatacataattagcggtatccgtttattgcttacagtcaggattctcctctataagaagctacttaccaccttagacaaatcagggttctgccgaacaccaagggttccaatcacactggcagagaccagcacaaaagttctttcaaatggaatcactccaggtcagtatatatcctccttacctaccagaatgttactgaagcctaccatatagactatacgtatccaatctgattttgaatacaatatttgcaaccaacaatccgacacataccatgccctcgctcatttcaccttggatattccgccaggggaggatagcaaggttttcattgctattccactaggcaaaggccagtttaacctagcagtggaccaagctattgttggacgagtcaaatcccaccacaccgatctgagctatttacagttgttgagctccgatctactttttgccgccaagtttggtcgttcgtatgccgagaccgcgtttcatgcgttgagtgaaatgatatccaaatacaatatagcagcgggttcagtctatatttcaaatgaccaacgcggtatcaactggtttgaggcccaaatggagcgctttaacgaactccaaacccatttttataaacaaatcttgccatgaaacttctctgtaaaatttcgtgtgggcaagagacaaagtgcagcaaggcctagaattcgaagagcaggggaacatctggcaacaccgcatgtaactagcaccttaattaatgcaccagataatctgcccaaaaatatacctacaagcccgaaagtgctggttattctacttcgctatcatgtgctcaccccgatgaatgattagtaagaatatattttcttttcctgcctcataatattttctttactttaacataacactgcagcatttaattgcgatgtacccagattttggatcatgccgctaaacagaagcgccacatccaatgtctactaggaatagaacggtcatcaataaaaattttgcaatagaatgttgattgcccggccgatcatagcatgaaatgcaagcaacttctctatactgcatactctcatgaattaagtcacgaaccctaatctgaaacgagctaatctaattttagttcaccgctccgtaatggcggcagaactgtaacggtaatggtcatacaaaaatcgataagtcgtggttataatacagtaacgccccatagaatcgcggagcatcttttatgcggaagtccaattcccttgcgatgtcaacaaccaagacaataatgtaaactttcaacaccagggctataaatatatagtacagaatggacttatgtctctttggattgaaggcattgctacacgatcatacgttagttagtcttcgggggaaaaagaactacggaagacgcctggaagggcgagaatcactcaccatgagccaacccataccctcagcaataccagagccatccacagcagagcacgcaatagctttccactctcggttccgaaattcgtctagtttcaacgcctctgatatctcctccggcgtctttgccccctctagatcctgtttgtttgcgaacacgagaagcggagccgtgcggacgtctcgcacgccctcgaaatccagtaagtacctcagttcaaaagcagcgttgtccagccggtcgatattagtggaatcgaccacatatatgatcgcggcagtatcgctgaagtagtggccccacattggacgcaacttgtctcggcctcctaggtccttaaggcaatggcaagtgggtcagcatcaatagcacactcaggttatctagaagaggctctctggtccaaaaaaggaaagtgatatacccaaacgacgagatccacatctctattatatgtcactgactccacattaaatccaattgtggatactgtgtcaacgggcccgagattctagagacggccgatacttagtgtttaacaagcgaaatgcccgtggctttgtattacctttagttgtgagtagaggatggtggtctttcccgaattaaactaattatacaacgcgtggtggtcagtataataccaggtaggcatctccgagtgcgtaagacgccgaacgtacgagtccccacatcaagattcgatactccttctttcccaatagcgagggcagtagatgcgatagtgaggcgcccatgctagtgatgggtgggcgatcaagcggtggctcgttgctggaacgtaagggtgggaagggtacacgtttctgtgagtgtcgggaagagcacctcgttcgcattgacggacacgctactctattatataccaggctacgccgggcgctaaacccgagggggaaaggagaatccttgaaatgcacgtgacttgatgatctcgcagttctcttatctgagggatgtggctggttattgcttgctgcgcttgatatgagagttctggcttgggtcgatccgattcctgggaagatggtaattacaccgatataacaaacttggtctgcgccaaccttattccctgtcctagaataggagtcatctgatggtgggtctgaacatgtctaatggtcaaatagatgtggggcgagcatccatctactcgaactatcactaaatggatatcaccgcctatcatcgcggcagtttttagtatttataatcccgcaccttccaggcacactaaatcatttcaccccttataaagccgtacgacatatgagtgctttttggaacctccttattatgtctttctggacgtgagatctgattgcttcttcctgcctcaaaatcctttctacacccactagcgttgcacgtttcgaggaaatgaccataatagaatctctaccgtttgatatcatatcaatcacactccatactctcgatttaaattgccccgctcttaaatcactttgttacgtctctcagttttttcgattttggacgcaacccctcctttttaggaactttcaatcaagtttgactaagataaaacatcagtccggctgtaagtatttgggaatgctccaggaaattatagatgcgagatcctatggcgggacatgtctatgtttgtcttatttatgtcatgatgtcataggaaatgtagttgtcattgaaattgtgggtgttccatatatagcgacggaactagaaacctcaaatacccaactgcttacactttctctgcgcagtctccgtctactagctcacataatccatttagcattccaatggttctctattctcttagcaaagagaagtcttttacatgatctttatattgaggaatcgcctcttaagaacccccctgggcactgcaattttatccaccctcagatctactggttagactcgtattcggaagatgggtctcttgggtaataatttctccagatggatgggactgaaagctgcaaaacagcgggagaaagatgaagcgtcacgtcgcgattccgatattggcaggcagctgaagcttgaaaaggaaaaagcgaaaaagacctttaagatactcttggttggtacgcatacgggaaaattttctgctgagataaccaggagaatatactctttcctctatcgctccttagctgtgctgtaacaatatattctttatttagcaggtctaaacgcagcaagtattcaagtaacaacagaataacaaattaaatggaacaaggacagaatgagcaaggctcttagacagctctagacctttcgataaaacggtgtgatcgtcgaagcgttgacggaataaccttgtgattttcctccgacgtgatagtctcgcttgtggacccagagtgtctgccttctgggacctgtcaacaaaagctttgtatatgactttaggttcagcttaccagcgtgagacgtttgaagcgggctagcctcgatgtcgtagtaataagcttgcatatcaaaactgtctgtaatatccagagtttcatccactaggcaaggattgcttgtaggtgattgcccgacgacctgaaggcttccatggtcttcgtaggctagcgttcttctcggtaatgggatgaatggcaaagagatagcctggcttctaccatcggtataaaagccagaatgatctatgtcggcctcgttcagatccattgtattttcacccgagggcattgagtagagagctctggtgtcatcatactccagctgtcaaatttataatccaggtggcccaaaacaagaggttgaagcccttgagtgcaaggtagaacaggaagagagagatcagagcttggttcaaggaattcattctggagcctagaaaaaacaccttcgaaatatgtgcaattgtagaagcaagcctcctcaataagagcttagaaaattgaaagccaaacgcttgaggcggactcgttacagacagcctacttgttacgttggcttcggatttggcgcacggttacctatagttaagagagtccttctagaccaatgttaggcctgtgtttcccaaaatggcagggtatgggagatatgagccatgtcgctcggtgagagactttttgggggactgacagaaataagagctgttttttgtgtggaatccaggattgtgcagagctgaccatatccgaaccatatccaaggaatggaaagaagggaagtcagtcagcctttttaatacccaggcgcggccagagcattattagccgggaataatgcagtatatcgcctttcagacacccatacaaccgagaactgcgataccactgcctcgttgatactactcctgcttgcgtcgggtgatcacttgggagtattccgggcgaatttaggcgacccgcctcgtcgaagggcgccttggattcgtagtacctactgtgcaagggtgccgctttcttcaacctgtaacgttgcagccttcaagacaccttagccgaggtttgagggattaggaaggaattgacaagaaatcaatacgagcggcagcctacagttcactaatcacgcaagccgatcatgtaagccatcaatttcatggatgattgtgatgcctcagctcagcctcagagctccttggggcatttttgcggttggctagtgagcgaaagcgggcctaatgagcgacttactgatgatagtctaactactacctgaacggattcttatagggctcttccggcggagatcccaatgtcgagacggtaggcttaccgaacgaacccgtatagggtcctttaagctatttctcctagacacggcgtgagaaaccagccactcaggttgacttcttctttcatctctcgtttcgcagtgcccgaaatagtttagccggatgcctcaaagcccccctcaggtggctcccaggtgaacgcccaggagttctttttgcctttacattcatcatcttcgcataccggtgctcgtagacgaagaagaatgtagaaggtaagcctttgaggaacataacaaaaataagagcacttgcagaaaaccgggctatgtcgtcaggctgtttgtcctgaagaacgaaagggttatcgatctcttccacagacaaaatggaaaagcccatgatgttggggtgacgttgaataaacttgtgaagaaagagtatgttgctgtacgctcgctgctcattcctgggggaacactagatattcaagctgctcggtcccactaagtgttatattccattgctgtctagaagttctaaacaaaccatgaatttaataagacagcccgagtggctgataccaaggcttaagcgcgccaacccggcctacacttggtgagagaggctctagaggtcttcaagattaagacgagttgatcattgtactcggcaaagtcaagaaatgtttatctggggattgtccaattcccgtggatggctgtctttgcgggagaatagacgcttgttagctcaggtaatctaggcatggtttatcccgcaaagggtaagcatttgatatgtcctgtggatggtgctcggcagataggacagctcttcgggggttcgagtttttctgcgcacgactcgcaaatcaagtgcccacatagaattgtcacccagtgatctggttgcatgtaacagatcttgtactctaaaacacgcctttctctttccctggaaagatccacttgcgccttttggtacctctccttctcctggcgaagttcaccttgacgtattcaattttcctttttcaaccgttttactttatggcggacttccttgttgagcagctggaaagcgttgtcctaatctattgttagataaggacgaagaagaggttgcgaggaacaagtactaaagcagacggcttcttcttttcggttcttttccgtttccgcgatcgagtctcatcttcggctgcatcgataaacatgccctcggaatcttcgtagctgttattacaacgaggggctctctgaggttgtgggctacctggctggaggtttggcagtttctcgtcattggctataataatagtgttggaatggcttgccattgtggcccggtgtttacatcggaggaatgttaatccagacgggtataggaagagaaaaagaaaatattatagtaagtaacgggctaggggaaggactttatagttgagactaacagtatctgacatagccccggcacttaataggacactgatgagtagcattatatgattggatgtcaagcccgcttatgtcgagcaattaaactctccggttaggatagatgtctctccattgatattgggttctctttctcatcagttgtaaataaaatgcagaaattgctggtcaaagattataaggaagcccacagtggttaaagcataaccataatagataaaagagtgctgtgggaagatgcaattgttcggaaaataaggtaaatctgataatttctaagttaaactaaattataaataagactgaaagcaatgtgtgaggccagctcattagaaacagtaggtaagcaaaaatttggtttgacaccggctcataataagactaaaggaacgtataaaatcacaagtccttattgtgctgtgtgcccacggttacctcggcgtcgtctccgctgcgattcttgtgtctcttaagggggcatcgggctacgtatctttagtagccgaatctgacgcttaagctcttttatctctgtcgccgagtcctttcttatcttatgagttgattttcgtctctgtgtagacgaggctagaccacgagctggcttactgtggtatcttctgttatggctgtggcttgactgaatagaggcgtcgctcctatcgtcgttacttttactagccttaaagtgattcctcgtctttgatctacgttggtttgtgtcgcgtgcaggctcgctaacttcactatcataatcttctttattaatatcgtctaatctatgctttctacgataagtattctcgagttctttagctttctggtatatcactctatcgccatctaaggtagagccggctgtgatatgacggatgaaggatctcccttctaaagtaaaaagtctgtctttctatttgacaagtatccgagtttggggatatactatgcctttagcgggtaggagtagattgagaggattaagtccctacttatcatcgtcttcgaccttctaactgatgccaataaagtcctccacgtcgtttcgcttgtatttccaaaactccctaggaagcctgttcctagtcccggttactttagcggtaccgcgagtcttcgtggttaaaatacgttctacccgacttgggttgtagctcttatataacccggcctgaatgtgatagatcggcgtggaccggcttctgtagtgcacgaatatctgagagctagtacctttgggccactaatataatactttagccgagtgtaattggcgttgctatttcattgttcttgcttctagggtatcaagccctgtgagttgaccactattaatattaatatctgattcggtactagactctttactagctgagagctggcgagtctggtctagctgattgtttccactatcggaagtggagtcggtatcttcattaatactaggattttgtgtcccgattaattgttcggcccactcttaactgatattccaggacttaggaagataatgtcgtttgttgaaggtctttagaagactacgtgttgtattataagccgcctagaattcatctggagagtgtgtctctattaccttgtttgctgcttgctgctaggtattgtatagagtattgtagctagtctcgggtatggtactagtgtcaatgtcgttgacgtcgtggtcttcgttggcccctcgaatgtgttagttaagtctttgaaagaattgaagatatgctttgtaattagggctataggatgtgaagaaatccttaactattttttccgactctttggatgtctcgctatgaatgacatttttgacctagcgacttagtgggtctagcttatgttcaattggagtatcttgatcagaagcatccccgagttcgttatctgtttcgtcatttgattcgtggttacctgcatttggggtaaagttatctgggagtgttgggcttctaacaaatcttgccttctgttcgggagctttgcccttcttattttgactatgctcttgtcttaattcttatgcgctcgaggatttaggttgatgggattcggagtctgagctcacttccgtgggtgcgggtgtttggatatcatgggcattttgctgggccttttgggccttctttctcgactttttgaccatattgtttcttggagcctagttaacttccctgtattcggatagagaaggcataatttatattccaagctcgcggtagtggttatgcggattgcaaaatcgatgctgtaggccaaaaaccatgctataggccagaaaccatgccgcaggccagaaaccatgccgcaggccagaaaccatgctgcaggccagaaaccatgctgtaggccagaaaccatgctgcaggccagaaaccatgctgtaggccagaaaccatgctgcaggttaaggacgatactgtaacgtaggagcaagcccgcaattagttcaatttctagttgagcctagttgagttacagtcaaaaatcaattgtggtaatatcagcggtatgtggatgggtgactgacaaggtaagaggagataatatttctaggtaggattacagatatttagacgagctctgtacatagacaaatacaaggctggcggaagtatatccctattcggactagtgttatttaggtggggcccggggagtaaagagagaaaaaagactggaaataataatgatttggaatattacaggcatattcgaaatcagttttaactcctcaatctcttcccttaacccatggccccacctcttaagagcactagtccgtatcgagacacatttccgccaacccctgcatttatccttatccttgattagccagcataaattacagtatctgtttcttggcattattcagacgtaagcaactacaacgtcgtcgttgggtttctcctgcatcgctctttaagtctcagttctctgaaacattctcgggtaagtatattgagtatattcagttgaacggtaatgtaaggcatcgccatataatttcccactttgtaaatgcatactgtagctatatacggagaaacagtcgtatatgcccgtacatggtggcagggcctgaagaggctttgattgggctctgattggtaatacgaaagtcgcgatcaggttgaagcggttcgcatttatttgaatctgttataaggtacagagctcctaacgttatgagtaccacgtgactgtgattgtacatagggtgtggcacgcctatgacgctagatattgaccatagctacaaaaaccagactcagcgtcgctcatacagcatatatgtatggtcatggcttgcgataaaagtcccaaacttgtagttctcattgacgccgataatgcgcaattctccatcgccacagacttgcttgcagaagtcgcaaaacatagcacagctcatataaagcgggcctacggggactagaccaatactaggttgaaaggatggagcgatgtgctactcaggaattcaatccagccgatccagtagtttgtgtacacccacggcaaaaatgcaaccgattcagctatgatcgtagatgcgatggatctcttacactcgggcaacttcgatgggttctgcctcgtctctagtgacagcgacttcactcggttagccactcggatccgggagtctgggttaaaggtatatgggtttggggagcgcaagacgcctaagcccttcgtcgctgcgtgcgatgaattcatatatactgaagacctcaggtttctcccagaatttgccccgaattccaatgaggtcgaagtgcctgaagcccgttctccagttcaagatgcccgacataatgataccccagatagtcagctgaagagttcggcagagacgagtctcgataatagtggatgggctcggctatctgaggtcggcgagcacctcataaatcgacacccagacttcaacccctccacacatgggtattctaagcttagtggcctaattattgcttcccctcacttcgacgttgaggagcggcctcctaaaccaggcgaaacgccagatttattggtccgaagacgaaaggcctctggtggaaattcgcaagtctgatttattattctggcttcatcaaataacgccaacgtacggagataaaattacggtattgaggtcaactgatcgaaatgtgggccgtctggcgggaagatgtcttgatgcggactagtgtgcttgaagtggggcgacggggataaaggaggagagattggagttaaaagtgattttgaatatcactgtactgtggcaattctcacttaagttcagacgtagtgtcttgtaagaatgccatcatttgccctaatacattcgagcactggaaatatttagtctgataccacttagcaacagccatccagttcaatatgtcctgttggtgaagttgaatggtcatttgcgcttcctagatggttgaatttcggcctttgatttcggcttccgcttgtcttacagcctcttcgaagcgagatgctttggcttcggccgccctaagtttctccacgagactgaggttttcagattgtatacgagcaatattttcaagatccgtttgcttttcgcgctataagaacccttataagttcaatgaattatcctaaagggttattgggtttacctttgcaggaactgcacgaaacgtttgacctacttcgcggtgaagctgtatgtaggcccctaccgagtgtttactcatatgcttctgaaaaagaggcttaagcgatggatcatctatctgccatgtatagagacattcgtcctctgtctttaatcggacctcggaagggtctactttaatttcgagcctctcaactggtcagagatattagtatgtttaatttaaaaaatctgtggagcttacatatatgctgagcgagtcgcgtcctgcaagttgatcgctaaatagcccgctttttattacctagaagttgaatttgttcatccatcacggtcgaaatcaggtatcaatgatagcacggcttagctatacgacgtgattgcagtcagcaggactgaaaagattggctagttgagagccccttccccacctaaagcgcagatccgtgcatttcataataccctcacaccccccaggtctctggcaagaaatgatttcaacctgctcgtaagaatcacctccattccgagccctcggaggggaccggagaactttcaccagtactaaaggacctctgaacgtcagcctaccaaacggccaaaagcatgttaaagtcattggtgcctaaggcatgaatccactcgagccaagggggtgagtaagctggtttacttgagggagataagagaataagtgccaatttacagtgtgtgtgtatgtgtgtgtaattcatttacgctgacccctcgtcgaaacgatatgcagcctaccgctactatatatatcttcctatgtacatgtatcgtgtaccacttcctaagcgaacttggagcctcgccgaggcctgccgtggcctctatgccgtcgttgtgtttatgctgcccttatggcgcgcggctttgaaaccgttgcgatgcttcagcaaaatccaagacagcctccactatcttggttcgtgatgcactgtcaatcttacctcttccttcttctcctggacactgtacagtaagagtcgaaatcagattcccctttaggcacacaccccttgtttctcggctcgtatccgaaaccacgctattccgtatatagacaaccctggtaataattattttctaagcatagattcttttaatactaggacgacagcattacgtatattattgtaaggtacccgaaactctgatacacacctcctcaatgcccctcctccatactcttgttcccttcctttgcagcaccactatcttgcaaattgctacatcctctgcccaatatggcaccgagactacccccatcaaagctacagtttattcatgatatgatgcaaagccagtcactaaccacatctcaaatggctgatgcagctgaatgcagcgaacgatgaatatccgcaagaacttgcggctattcgggaatgtcaacgcccccccaaatcgtgtcggtcggagacgaactataaccccactgatgatagaagctctccgcgaccatctactcgaaaaacccggtctctatcttgacgaaatggttatattcttttgggacgaatttcggatgctagcgacaacctcaagtatcaggagggctctcacttttatggggtggtctaaaaagaccacgcgacagagggccaaggagcaaaatgcggaattacgggagttgtatcttcataatctctcagaatttgagtcataccacctagtctacgttgatgagtctggttgtgacaaacggattggatttaggcgaacaggctggtcaccactcggtgttgccccggttcaagtatcacagttccaccgtgatgagcggtatcaaatattgcctgcgtatgcccaagatggtattgttttttctcgcatttttcgcggttcaacggatgccactgtgttcgaggatttcatcgatcagcttcttcggcactgcggacgatggcctgagccaaaatctgtcttggttatggataatgcatcattccaccactctggacgtattgcgcagatgtgtgccgatgctggagttaaattggtttatctccccccatattcgccggacctcaacccaattgaagagtttttcgctgagctgaagggcttcataagacgcaattggggctactatgaaaatgacccgaaccaagtatttgattgcttccttgattggtgtattactacggtcggggcaagggaagaaagtgccaagggccactttcggcacgcaggcttgactattgaggatttggatacctgacaattcgtttctggtggcgtcatttcattgagcgatcgcttcgcattgagtgcgaaaggctgccacatcttcgccccatatcgcgatgtatgaactagcgtaaggagagcattcatggggaaatttcctgacccgagactcatgaaacagactgaatggggcttggcgctaaaccaatccgctcgatagggtgagggtgccccaccctattggagccggcgcttaaccagtagaatgagagatagatgacaaggcgcagcaaagcatttaaatcgcaatcatttcccccaaccgcgaacgataatttacctcatataattctgcaagctctcatgaagacatcgaagggccaggctctcggttacactaagcaatttcaatttcacgtttgtcaactccatggctgaagtagttggagtagtatctagcgccatcacattcgcgacccttgcaatccaggtcgggaagtccgttcagacactgaaagactactgggatgcaatacgcgacgcacctgatgatctcaagtggctagtacgagagatcgaagtgttcggctccataatggctgatgtcgacgcggacctaacacgataccctcctgcattagccatgataaattgtcaacatgctttgcaaagcttgcaattctgcaaagaggccgtggatgccttgaacgcgctttgtgaggatctagtacaagatgtcgactcaaaaaataggttgcgcaggtcctatcaagctgtcaagatagtgctacgccaacggaaagttgagaagcacatttcaaaactacataatgtagtccgcctacttatgctatcacagcaatgctatacaaggtacctatccactcaagatatgacccatggatcggggctaatatatgcagagcactcattcaagtccaaccagatttaattgcggagagaataagagagcgtgatgttatttcctcaatgacagaaactataaaggctcattccgaatcgcacagtttgtcttctttattacttgcttatatttgattgagctaatatgtttggcagattgttgtttagacacaacgggaatgccagccggaacgtcgaaaagaatgacaaagagcgatgctcgaaaaagcagttctgtttggcgtctgagtttaccatactggatatcatctcaggttttggagatatgtggcatacaagcttctggcggatgggactttacgttccgaacttacactgaaattccttggaatgctggggttgacagattagtcagggaagggaagatagaaatgcttcggaatctttttgcctcagggcaactttcagctcttcaccgaaatggaaaccacactctgctccatgtaagtttccaatcactgaaaaattccgtcccccatatgcttaacgagcaataggatgcggtctgccgagacaggaatgaaaaggttgtggaatttcttcttaatgaaggggcagatccatttatcgaagattatccacgccggttgactccccttcgtcttgctctatggattggaaagctcgcaccatcgaatgaggactatccgcttttaccatatctacgtgttttactcaaaaattcaaaagacctcgtctatgggagtccccaagatgtggtcaacggggtactatccgagttttacggatcggatgaggaattcagatttttgcaacaacactgctgtccctggttctacaaaatgccgcaggcgacccgtgtggaggtggctgctcgaatttcattcgacgcttcaggtgcttgccatattcctactttgatccgtgctattcttggtacagaccctttggaagccaacgaacttcaaacgaaatgttatttgtctatgacttcgagagaaacgacgctcgctcattgtgtcgcaaaacaactaggcagagatctaactgccttgagtatgtgtcatcgaagacagcatcttgtccttccatatgagtaccagacattcgtgagatacttgtcagatgatcaccaaacaacccgacaaacctttcgcgactcatggagcaacctattcttcgatatcttgcgcgctggtatagatatccacctagttgttaaccacaaaactctatttctcgcatttatagagggaattcttgcgtggcaagtatctttttccaagtctattcaatgtccgcgcgttgatacgggagtcttgaattcagttgttagagcctggctaaaggatcttaaagctgctggggtgaaattggatcaatttggtacaaacgagtggtgcacttggagcaggggggatgttcaaagggattttgttggcgatgtattgcgtgtgactggaatgagctatggcacatcccctgatgactggtacatatggctgtcggaggcatctgatactttcgcggcggagttctggaccctgattgcccagccaattgtgacaacaccaggtgaatggccagaggaatagctttcaattcatcccataggaagacggccatctcatctaagtagagggcaggtttttcggctaagtgttcgcacagtgcttctagcaccgatggcgttatggttcgtcgccgtgtcatcgactctggctcttttattgcgagactttcactcgaagtgctctttgcagcttctcttccagcaccagccgccagtacgcacttggggtcaatactaggtcttcttcagtgtccttcacgacagccttattgttgagggtgacccgccattctataaagtagtggatacagcttggcggatcctcatcatagatcttgtctttctcccactcagattcctgaagcattggtaaagtattcggtcgagatcggcttgctggagtggtctcatcgtcgagaagcacggaaggggactacaaccagatcgcgtagcataagggcttcggaagtgtcccggcatatagtgaatcctgctcccattgttggaagtcttggggctgagagatgcagtcaacgtgatacgggctgtcactcatgtttaaacccaatcgaagctctggagatctgtgtcagcttacgtgaggaccagctatcagcagacgccatgaacgaatagaaacggcagtagcacgtagggccgatagggtaacagaaaaagaaccatacttagcctaccagggttagttctctacagcagtggcaatgccttcgtcatgggaggagatagatatgcacgaagaccatggagcgaaaggaaaaaaagctggaagtggatcaggccacatcgccggatctacccccgcccccgccttcccttcgagaacgttctgtggaaatttacggtattatacaatggctcatctgacgttgaaatcaaatacgttaagagatgccatacggctaaacaggggttgtttactgagtaacctattatggactagcgtggtttcgggtacgggccgagaaataatgcgtgtgttaccagaggggaatctgttttcgactcttactgtacggtaccagtatagctcgtacagtataaagagtttcgggaagtactgtagcttgtctctcggtactttcatcaggatttcgagcgcgtctagtgagttactgtgaccaatggcgggacgggccgcgatgcgaacccctgaaccgcccgactgtgacgaacgcgaagattcgccaccgcgactggcgagaccgaaacgcaccactcgaccaccgaacaactacgctcgtgagcaggaaattgacactgatcgacgaaagacgcgttcccagcaaaaggagagaattgagctaggagaccggcgtgacgaggtaacttcggacgacgccgcgaccgagcgcgaagagctcgacgtcggcggtttggtgagagagatcgccaaactcaggcgagagatcagactccgtgacgaaatacacaaggaagaaattcagagaaccagagaacagttcggtaccgccctcgcggaggtccgacacgagctacagtccctgacgaatagaaacacgacaccgcaatgccactctgagacgtgctctcagaacaaccacgatgcgatcctgcgcgaaatccagtccttacgcgaggaaatcagtgttcccgctgttgcaggctctccttcctacgcagatgtcgcgcgcactccgccgtccagttacccaagcaacatacggtcccttttaacgctgaacacgacacccaccacctttacggacacgctattttgcacgatagatacctcgaagatggcagaaaaagggacaaaatcgacctccgcaggctcggtcagagcagcggttgaggcagagatacagttaacagagggccacgcgcactggcgctgtcgcgctgttaccgttgacccgaaaaacgccaaccggatcaggatcgcctgccgggatgaggatgaacagcagctggtcaaaaaggttgcagaacagaaaatcggggcgggagctcgggtcctccgtgacgagctctacccgatcaaagtcgatagcgtcaacaagacctccgtgctagacgagagcggtgaggtccgaaccgaggctgcagcagcgtttagtgaggagaatgagaccaacgtagccaagatttcatggctgagcagaaaagagagcgagaaggcctacggttcaatggtggtttacctgaccaaacgcatcgacgcgcgaaggctcttggccgacggatttttccacgcggggggagaatctggtgtgactagtgtcttcgaacaccgaccgcgaccgacacaatgttacaactgccaagagataggccataaggcattccagtgcaagaacgcccagaaatgcgcgaaatgcgctacagagggccatcgccacagcgactgtatccaaccggttccaaagtgtgtaccgtgcggagggcctcacgaatcgtacagcaagaactgccggaagctctatccatcacgtcatgaataattctcttcgaataattcagctgaacgtgaggaagcagggtgcagtgcacgagagtttaatgaatgacgaagacactcaaaacgcggtggcgctagcgatccaggaaccccaagcgaggaggattcaaggccggctcttgaccactccaatggggcatcacaagtggacaaagatggtgccctctacctggagggaggggagatgggcgattcggagcatgctctgggtcaacaaagaagtcgaagcggagcaagtccctgtggagtctccagacatcacagcagcgatggtcaggctccccgagcgactgatctttatggcatcggtttacgttgaaggaggcaatatctcagccttggacgatgcgtgcaatcatttacacgatgcgatcacaaaagtacgacgagagacaggcgccgtggtggagattctgatggtaggggacttcaaccgacacgatcaactctggggtggagacgaggtgtcgctgggaagacaaggggaagcggatccgatcattgaccttatgaatgagtttgcgctcagtagcttgcttaaacgcggcaccaagacatggcacggcggcggacaaagtggagactgcgagtctaccatcgatctcgtcctagcttcagaaaatctgacggactccatgacaaaatgtgctttactcgagacagaccacggctctgatcactgcgccattgagtccgtgttcgacgcccagtggtcgggcccaaagcaccaagagcgacttttactgaagaatgcaccatggaaggagattaacgccaggattcagaacgctctagccatccttccgtcggagggcacggtacagcagaaaacggatcgactcatgttggcagtgtccgaagcggtacacgctttaaccccgagggcgaaaccatcaccacatgcgaagcgatggtggacagctgacctcactcaactccgtcatatatatacgcactggagaaaccgtgctcgctccgagcgacgggcggggcgaaaagtcccccggctcgaaacgatggcccaggatgcggccaaacaataccacgatgccattcgcaaacaaaagaagaagcactggaacgagtttctcgcagacaacgacaacatctggaaagccgccaagtacctcaagtcgggagacaatgccgcgttcgggaagattccgcagctcctcagagccgatggaaccactacgaacgatcacaaggagcaagcggaggaattgatatccaagtttttcccgcctttgccagagaacatcgacgaggaaggagtgagaccacaaagagcgcctgtggacatgccagccgtcactatggaggagatagagcggcaactgtcagcggccaagtcgtggaaggcacctggtgaagacggcctaccggcgatcgtttggaagatgacgtggccctcagtcaagcacagggtcctcgacctctttcaagcctcgctgcaagagggcacactgccaagacagtggagacaggccaagatcataccgctcaagaagccgaataaagatgactacaccattgcaaaggcatggagacctatctcactccttgcgacactcggaaagatactcgaatcggtgatcgcagagaggatctcgcacgcggtggagacgcatggactgccgccgggggagccactttggggctcgaaagcagcggtccgcagagcaagcactggtgttcctgcaggagcagatctatgcggcgtggcgcggccgacgagtgctgagcttgattagcttcgatgtcaagggagcctacaacggagtatgcaaagaacgactgatccagaggatgaaagcccgaggcataccggaggtcttgcttcgttgggttggggccttctgctcggaacgaacggcaaatatcctgatcaacgggcagttatctgagactcaaagcttgccacaagctgggctgccgcagggctcgcccctgtctccgattctatttctgtttttcaatgcagacctcgtgcaaagacagatcgacagccagggaggagcagtcgctttcgtggatgattttaccgcgtgggtgaccggtccgactgcgcagagtaaccgggaaggaattgaagccatcatcaacgaggcactcaactgggaaaagagaagcggagcgacatttgaggctgacaagacggctatcatacactttgctcccaagatgcgtaaattggaccatgagccattcaccatcaaggggcagacggtggtacccaaagaccacgttaagatcctgggtgtcttgatggacacgagacttaagtacaaggagcatatcgcgagagcagcgtccaagggtctcgaagcagcgatggagcttcggcgactccgaggcctctccccagcaaccgcgcgacagctattcgcatcgacagtagcaccagtagtggactacgcctccaatgtctggatgcacgcgtgcaaggataaagccatggggccgatcaaccgagtccaaagagtaggcgcgcaagccattgtggggacatttctcacagtcgcgactagtgtcgcagaggcggaggctcacatggctactgcacaacgtcgattttggaaacgagccgtgaaaatgtggacagacatccacaccttgccggaaaccaatcctcttcgccggtgtacagatcagatcagaaagttcagaagataccaccgctcaccactgtatcacgtagccgatacgctcaagcacatcgacatggagacattagaaacgatcaaccccttcacgctatccccgtgggcggaacgcgtacaaaccgacattgatgagcagcatgagtccctggccgaagcgggcgggtgcatgcaggtcgcggttagcagctctgcacgaaacgagctggtgggttttggagtggccatcgagaagcgaccacctcggaatcggaagcttaaacacaaagcgctatccatcaccttggctgtaagggcagagcagaatccattctctgcggaactggcagccatggcacatgtattgagcacggcgacgggactgaaagactacacgatcgcactgctcacaagcaacaaagcggcggttctcacactcaggaaccctcgacaacaatctggccaggagttcgtgtgtcggatatacaagttgattaaaaggttgcagagaaacggaaaccatgttcaagtccgctgggtttctgccagtgaagacaacaagctgctaggtctggctaaagaacaggctagagccgcgacacaagaagatgccctcttgcaagaacgcgccccgaggataaaatcaaccacgctgaatctcgcacggtctcaagcagtccccagaaataccctgccagcggacgtcggaaagcacgccaaacgagtagatgcagcactcccaggaaaacacacgcgacagctgtatgatcccttgtcatggaaggaagcgaccgtgctagcccaactccggacgggcatggcgagactgaatggatacctctatcgaatcaacgcggccgacacggatcagtgtgcgtgcggacaagctaaggaaactgtggagcacttcctctttcgatgtcggaagtggaccacacaccggacggatatgctacaatgtaccgacactcaccgaggaaatctgcccttttacctgggagggaagtcgccttccgacgatcaaaagtggacgccaaacttagaggcagtacgggcctcaatacgattcgccatagccacaggccgcctcgaggccacttaaccccgccgacgaacataaatcacccctctttcattctaatctaacccaccaaccacctcgtgctattcacggtggacgcgcttcaactgccgaagataggatgttgaacacttggagaagcgccttcaagccagtctactaaccaacttactaacccacgagcatccgctgcgacactgcatgctgagaatgacaaatacgccaaggtcttgtgtatgggctccaatgagtcacagaattgtatatactatgacatgtatagtagtttagcgatagttgccctttcggctcagccgccgggcgttaatgaattgtgtgtgtgtgtgtgtgtacggtaccaatacatgaagtgatattccggatctacagtgacgatgcataacttgagcaccctttggttaccaccttccaagagaaacacaccgcctaaccaaatagccttaaacaatcatgccgatcaactttttaaatattggtgaggctagagcgggcagtattagggtgttcaaacttatgcaccgtcactgtatatcagtggtatatcttggcattagagtccgagaaccgattgaagagtgtaggtagtgacaccagtttcgggaggcaatataactgttctacattaacttctcaggaattattcgtgaacatttcatggatagatacaatacagatgaagatctaatagggaaaacactgtatgtgtagatggacgcgaagagaaaaagagagagggagcgtgcaggcaaactatccgggttgtgatgcctcagacacccaggcatccaacattcttctggagagtgtgtaaaagattcattgaaattgtgcgatcatatacgatctcctgtaagtaaaagacattcttatagactaatattcctagagcatataaaggactcagacaaagttttcagcttagactcgccatctgtattctatgtttcatgatacaattgatttctgtctttgaaatatgtatgtagcactctcctatcttgggctttcaggaactttcttaagtcaaagcctataagctaacactttgctaatttaagccgccgtaaggaaggtaaagggacagaggacacaaaccctagaaacccagggctttctatcagcgtcaagctctcaacttttgctaaagcagcctttgcaatttctaggatattatcatctttagtggctagtttggaatgtatcctatcaatctctatatatttcaaggtcaatcctgtggactgagtaatagccatacccctgagtaccgccttaaggtgaacgaaaagtgagtccctaagaaatatacgattggagaaccaaagaagctgatcttcctttgctccatggaaggagagcttgatagtatttaggttggagagatgccgaagtgattctgtaaaagtatggatatccgtccgctcttttaagagtaaactctgagctcttgtaagttctttaaaatatcgaaatattgccttgtaggaaaattgctttcctcggagctcctaccggaaatcttcctgatctcttgtatactcctatagtgtataaatgcaagtagaaaaatagtcctaatatgggatcactgaaaggattagtaaggagctagatgaagagctgaaaaatcacatatatggatcgaccaattctgatgtatcataatgaagtattctcacgcattgtgctaacaaggaaattgccagccccttcagcttcttcatcccttattctatgaactcgactttaaatgtatagaagatatctgaggtgctgaccaacctgcaacttttattcacaagcgaaaaagatcttaaggagtggtaatcgagatcaatgataatcagtcttagtagctcgaaaggtagatccgtgaaaattgtcatgttactttgaagctaggagagccttgatataacttatcgaagggtgtaaagaaagattgtacctgccctagggtgaaataagtattaattctcgtgtagctgggactctgtggtaaaataatgtaggaaagagttgcgacactgtttctagtacaccggtctggctgctagagatttgccgctgatctttacaattgctctcccacccgggccgcgacactgtctcagagccgcggcaaaatttctatagagcttgacctggtttggttcatgcctacagtcgagcccgtcgatggatactggctattgaggacagaggtctgagctctgtagtcgatgcctgtaggtaatggataagagagcccaagaatcatgaggccaagaatcatgaggcgcctcggccgacctgagaattaaagcaacgagcttgtagtcggagaaatcatgaacggacctcaagtgcgtacctctactcggttgtcgtgactgtattttggaccgtgggcgaattactaggcaatggacggaggcctcagatgtagcgcgttatgggtctatccatacgtttttggacaagaaacgaaatcggatttaacctaaatagttgtaatatccaatgtgagcggaattttacctgccgttggtgactgggaccgttagtgtaataaggttctaattgagtggccgggattacccctttaggatcgccaggggtgtaaaactttaataaagctcggttcgggcggtttgatctgtcttagtgatatgcatgcatacggcttatgtcactatgattgagtctctttgaggatagggaaaagcccaggaagaaaaggaggtgaaagaaagatttatctcttatatttgatctactatctaacgtgctggggactggttggaggtaggacgttattgtaatgaaaggttcggaatgggccggtagcttctggtcctctatttaggtagtgatcttcgtttaggtagtgatcgctataaggctgcctgatctgtcctagtttttactttcggggaacacggaatgttgaacgccataactttgtctaccatgaactgactcgagatgtggtccctttgtatctagagatatatagagctatagatacagcacttgttttgggttgagacctttacttaggctagttactagtgatggaaaagaatattcttatataaacttggaggaaatgaaattgaggaacctggcgcagcatgtaaaatcctttgtctaatacctcagcccttggtggaaggtgtatctgtgatgattttgacattcgattcttctgatgaataaatagaggacctaaatagcctaccttgacctgcgttccctttagggggttgttgagataactggtctagagtagcctgaaggtcttgtacagcctgttcatgtgcgtggaggagagactgaagacaattgatcaactctcgctgacgttggttctctagtagaaaatgctctattgtttccttattatcgatatatccggactcctgcttgtattgactcaatcgctgtagctatgaattaacagctgggtacaacttattaagatgggactcgagcccttgtactttgtctctttctaaatgaaggctttgggataacacttgataggtttctgtggtatgacgtagtgaagcctcaagctgcgatttttgatgctgtatcctagaaagcgaccttttgtaatagatatgtaatttttgatatgccacggaattgctgttgatcctgagctccaagagcccctggtaatgctttgactactggtcttggtgtaacagcttctctaccaagacaaagacgtcattgttatattttgcggtgtttgtattgtcctagatttttgaaacagaatcagcaaatgttatatctactgtggataaaaagtcggctttactcgaagaatggcagtagtagatggcggagctaccactggattttgatattgggctttagaagatatgtcttgaagaattggcttggcctttatcatataataaagacctgagggctcgtttcctttattagtggctaaacaatgtagggtgtgacgatacacagctaaccatggtatttacagcattcagtgtcgcaggaattggtcggtgtcgcaagttgttttcagtgtcgtaagttgtttttagtgtcgcaagttgtcttcagtgttgtaagtcttttgtcgttttcagtgtcgtatcttgtttttactgtcgcacggagagactcgcaggtcttggcaagcgcggtgcgccatgggttggtgcgaggtggatatacggatgtgcacggcaacgaacgatattgcgtgccttatgacgcctgtaaatgaggcccaaaattccggctagttacactgtgtcggcctgattgataagtcaactgtaaatcatctcttcttttctaatattaagaaagtgatagtttggttgctatccttgtatctatcgataaaggcgttgctattgtgtatttatggagttattttcatttgtcgattctaactataacacttgtatattattggatgaaatcacgtggtgaaattaatctaaatctatatagctatagagtggggaacctaggtgggtattgaaatcgatgcactggcatatacgttgaggtatattttgtgtcgtaggtggtgtcatattgccctgttaattattacctctgcttgcgttaagaggtgatagagggcattgtcaatatcgtccttttaggaatggcattgcctcccgctgtaagcctcctttgatctctttaatatttctgtaccaacctaaagggcgaaactccttatctatggccctggttgtatttttatcaaatacaatgagtcgatatactggttaatgtctcgatcccatatctgaggagattactcccgcggaccattaaattctatgtcttggaggcatattgtccaacctcgagagactacagtcccggttgtaatgtgcaaagcgacaatcgctagatttcaagacccagttggaagaaactgcttataagatgggctatctcagagcagagcttcagtggcataaagagactaaatagatactcttgcagttctaagaatgggtatttgatatctttagctccctagaagacgctcttatataggcaaccgcgcgcctgcacgagtcggagtagtaatacctaatgctttggggatctaattctagaagtggagctgggggctgtttttgacttgtcaaatgtttcaggttatgggttggacttgaaggaatttgagctgtgggatctactgagtgctgtcttattgttatagtgttgggcttctttttatctcttctagagaatatcgacgtatattatagaaattgcaatgtgctaggtaatgctatatttcttgctgatggtagcgatttgccaagtcaccaaattccttcattaccatctactcccaccttatcacctcgagcagatacttattaacagttttaaacttagcctctaagctttccgttccctaagataaactagctatattatacttcatactatctatacagtgctctatactatccaggcggttccctatactgtccagacggcgttctatattgtcgaagcggctatttaggccttcgatattgttactcagcgtttgcgagagtgcgctaaattggcttatcgtactcgtaaatcgcttgagggtgatagatagggcttcatccgtatgcgagatagtttcaatctctcttgggccttgcggacgacttgaggataataatgcatcgacttggctgccattttgtcagccctagttgggacctatcttgggggaaggataccttatcctataatcgctcccgtcccggtacaggtctgtcatcggagcgaccctagacgcttccgggcacacttcagacttaaacccgtcatttcccataaccacatcctgctgctaaacgaaagcactcaatatattatatatctcaatgtctacttatatataaagtatcgtttcgttggtgccaagataatgaaagggatcatacgaattatctgggacgtcgagtgctagcgacgcttcgtagttatgaccgtgcttgttactagatatgttcagggcgaggtacagaataaaaattggtctcggatgcggcagacggatcttatatctctctctgctctaagcgctggacttccaatgactaggacggggccaccaactgttgggtaatgggagcactttattggttatagtaccctgttgttgttatccctgttcgacttttgcctcttggacttggggaggcgagagtgggcctagacaaaagtacgtagtccgggatctataccagtaaatgggagccagggtgagaatggggtgagaacggggtgagaaggagattgtttggttatttactacaaatgtgaatgaattatcaccctagttatgaaataagtctgttatttgaaggagtaatatttacatataaatatctcgcaccatgagacatgagagaagtagattctttatctttatttcactatgcaaaacttgatagatattggctggcttgatgttggcgcccgggaagattccacgtttgtaatctaagataacggccggctgcgacgtgtaatctctgagttgtgtgactaagataggcaatatctattattatgtatattcctcggtgggaaaacgaagaatcacactcttcagcggctctaccctcttaataacataaaaaggtatgattctgaggctctaataaaattgcgatacgatgtcgcttctttataaagccggcggccagtattgctagctgatggtgatatcctgagcaccgacaaattgtaccctataaaaagacttgatgccggcgttggccatccagtctattggaacaactatttagcggctaaaatactactggtgttatagtcatagttgatatttgtctttacggatgtagtttgcatctttatcgacgatgttgcttgtcttgaaaaggtcgtgaactttcttgtcagctgtttgcagcttcgttcgatgtcctcattctcatcctagcatttactaagggcgatatttatttatagcctatcggtgataaaagaaaggggtgtgtctggtttaggattactttattggagaatctaagaaagcggatataatgatttatctgggttgttctctagctctatatatttatacctataggataataatttctctgatatcataggattctaataaatcaaagcgtctatcatagaataggtcgacgccatttcctttattcgataagaaaaccgagttcggccgaatgggacgcatttgatagcattatttcaagcagcgatccaatatattctagaggatatctcttatccgtttgatttcgtggaagctactaggaaggatcgccctgttagtttatacgcagagctacatttggcgtattatcttgagatcggccaccgcgccaatctcctactctccggattggccgccaccattttgtccgcgctttttatagaccactatgttcccgagatgcttggttggtcctatctcaactttttataggctgaagctgatattagatagctataaacccctgtatggtatttagaactttatattggtctattattattatagcgtattgcagttccaaggcactatagcctaatgtatatcccgccaaagaaagtgatctggttgagttttatttttcgcgcttatataagcgattctcggagaatgcagtctccttagcgaatttacgtaaagaagaactcaagtcctttagtggccagttatattgtatgcgaagcaattgtatttgtctagtctaccttctacgttctatataatatattctagcgtgtggatatatagtgtgcgaccgctgtatctagattttcggaagccctacctctgggctggagtattagttcacaattaagggctatctctattacctctactagaggccgttagtggtagatattcttccaccgactataagccctataatccttaccatcgatggtagtggagtaaggggggtgatcctgttggagttcctacttctggtataggaatatctacgcctgtgcgcgatataagatgtggtagatcttgtactcggcacaagtttaggtaagttagtaaccttatggtgtaaatatagtttttccagattaggaaacctaataaaggatattataggtggccttatcgcccttaggttattcgcaatgatataggatgttatgtattacttggagcgatttaataccttagcatgtcgtattttccataaaagacgtctctctatcttacctctactgcttcgctaggtatttggctttatatctatctttggggacatggccaaatgggtcaaatagctcctatataacagctactatgattcgcaggtcttcgatgccgccctaaaaagtgcctttagagagcgttgtcgtatttttagtgccacctgagaagatccaccaggaccacgatgctccggcccgaaggtcggggtagtaaccacgagcatttctagggatataagtacttttgtgataggtaacttcaacgtggcctatgactcaggggataaaaatggcaagttcgacgatcatatctgcctatgtttttactaatataactagacttccgaataatacgtctagatgatacttgaaatgaaccaactatgtggcgaatgtaggcctaagcttagcatataccctattttctatagttagtgctaactaaaatctagagtaagagctaccgccgcggctctgttataagtcgatctcatatattatttcgtgtgagtggggctgactattagatcacaagcttttttatgctagcggatctatagggaatcggttccttttaggatagtggactaaagtacaacttcgcgggagagattgcacactaggtcttgcactaaatctagcccacagccatagggtctacaagaatactgtcattgggtactagaaaagtgcagtctaataagcaaaccccgtatttccgccacatcttttgtaacagtttcgtacgttggggatttgatacgtggatattaaccatagagatagatagtgattagagaaaatggcgaagccgtctagataattctattaaaagtaacagttactgtctagatgtgcctttaggaaatataccttataccattgatactgtcgaggttatagaggactatcgcgatattatcatcctctatattagtagtggacgaatagcccgggatatggtaactacactacttatctctagattcttctttattgtcgacttattgctagaaaatactgtaactccattctggtattgcggatcagtgtattataaagggccggctcggatggtgatcttagctttagaaaatctctaccctaataggcttagctatatcttagattgtagattaattgataggtttaggggtctggatagtctctaccccttgtatagatactacagccgctccgttactttcttagcctgccatctagagtataaggtgaatatatatttccagaccagttctaaaaagcgctagaggattagcggcttcccagagagtatggcatcgtttatttcacgataaggcctacggtcttcgtttggttaagacaaccataggtatccctgccgataaccttgccagagctatgacgtgatccgaaatcccgtcaggggtaggagacgtaagcgcgaatcaagaggctccggagatgtttatcccaggaaacgtgcacttgtttaaatcaggatcaaacctagaatttatttatagcgtgttcgataaggaaactctcgggtataaatatgagtccttttttgtctatagcaaaaacttgtaatgtccatgacttataaaatttcgttaccccttttcttgttctaggttcttttactaaatgatattgaagtcatgggtggccccgatccttataggaactcctgagttaaattcgcaaggcggtcctatacattgaaagtcaaggcctatgagcttgctaagttctgcgatacggatatctatgtggttgtcaattatcagtgaggatcgtttgtctataacttagtcgaggatagatcatggccccctaatgataagaagctagtgagtaaaataatgcctaaagtggcttagggtttcggcgctatcaagctaagagactggtaggaatagtagtatcccaatctggaacgaatgaatttcagtaaaatggaaaatctgccagaaagcccggagagtaatttatcttggctcacttgatatttcgccactaggttggagtattttcgattattagaggatctctatagggacatggatctagcaaatgttgttgctgatgaagaggctctatagatcaagtctggtgaatgtgattaatagaatatacttccttttataatacgataaaatatctgctaagattttgtagttacttggaagatcctaccttcactgtttatttactaatttaatcaagcggaacgaaagttagtatagtatagaggggagaatagatggtgcgtaccctttgtgttagattatactttgcttttgtgaaaataagtcaagctctagttgatataatctcttgtgagctgttttagatgtcgtaggttttcttaaggaccaaaggctaccctctattttacagcctgcccagcttacaattgcgaatatggtaactcagtctcctagttatccggatactcaagtcgttggttcgacttacgagcccttcgaatccagttatatgcggatgatcatagaagtggacggaatttcctagtaagataacgttcttgctagtacagtacactggatacttcttgctggatatcttgtgatacctggaacgttcacatctctctaaaagtccgacaccatctataatagcctcgccgataatgaagcaggggagtggattttaaatactattcagaatcctcctcttctcgcaatggtatgtgtactgtttgtatcaggcttggctattatgagctggctgttctgggaatattggggaaattatatttggcttaccaatcgaatctttgtgtgagtatcatctatttattatacgagaactctcttaattatactagtcccatacttcttaatgccttagctggctttcttactacgattattagcctatatactgctcacgatggcgattggtctatcatggtacttttgactgtgattacctctggtctgtccgttgcctgctccctcattttgctatatatttataaatttggcaaactagagagattgaaacaagaacacaatctgatgtttcgcaactacgaacaccccctccatgtctgagagttattctttctctatatcatgttacaggatggatcgaaattagtttcaccacctgcacacggagaatctatctcggaccctctcttgaaacacactatacttattacagttactcttcccctgaacccgtgtcttggcagtaattcaatacacgtgtaaataatagcttaaaaatagcttctgtattagacctgtatggctcttaggcgtctagaacgtttaccctgcaaacaggccaaacacaaaggttgtctgctcttctcgtctggagatgtggccagaattcgaatcccactcccgtcaaccacgcacggtagtcttggcgccattttggaaaggaatagctggatgtggagggaccttgggcagggattagtgggagttccctaaaaaggtgcgacgagcgaccccatatgctcacccttgctcacccctctgctcagcgggcaggggaaataatttagggtgatatgcctggggaatggcaggtattaggagatgcacgtgaccttcgatcttgtaggagcctagcagaacatctgacctcagaaaaagatggcaaagaaatggcacaccttccctcggttatgttatgtaatcaccaactgggatccaatacttcttttacttgctgggcgaagcgatctcttcaaccgagaagggtcagacattttatccggaaaatgctggctggttacatgctcgatctgactttgggatcgggtcgtcccgtcctgggaacgccattaccggcccccacatggaagtagcctcgttacaaacaattcagtaagcggtgtggagaccagaaggcacacttgatctgcctggctgagcacgctagagtcacatgatgacgaggctgagggaattccccctcttttagttcgttggagtcctactgagatttccgtcatgaccaacattagaactttctaaaaacaaatactcctcagcgttttctgctagacgagatagtatttgacacatcgcttactactatatctcgcgcatccgggcattttgttagtcgagcttactacccaccatggctgagagttcccaatctcagccagagcaatcagtgtcagggcaggataaacccggtcccgacagaccaccatgccaaaagcgactccaacatgatgcatataccattggatgggtgtgcgccctcccaaaggaacaaaccgcagccagagccatgctagatgaagagcacgaacctctcccgatccctcgaaatgatcataactcgtacactcttggctcaatacgcggccacaacgtcgtcatagcctgtctgcccagcatgggaaccaaccctgccgcaaccgtcgcgacctctatgataaacacgttccaatcaatcaggttcgggcttatggttggggttggcggcggaattccgccaaaggtcaatctgggtgatgtagttgtcagtcaacctgttgctgactatcacggggtgatacaatgggatatggggaagctggaacgggatgggcggtttgtccacacgggctcgctaaaccgacccccgaatgcgctcctcaacgcgtcgaaccagctgaaaagtaatcatgagatgtacggatcacagataaatgagtacctgattgatatggaaaggaaatttccacggctagcgccaaaatatacgagatgtaagtgcctgcaagacccgttattggtatccgagagttcctggtctccgagggaagtctatttcctgtcttggttgtgggagccgataatcgcaattatcgcatatcttcttggttcatgggccattgatctggtaaacgaggagaatgtgcggttatcagatagggcagacggcgcaagggccccaagagaagtcagggtacaccatggcctgatcgcatccgggaacaaagtgattaaggatgccaaatcccgagacctccttgacaaaaaatacggcggacacttgctatgcgtggagatggaggcagccgggctcatgaatgacttcccatgtattgttatccgaggcatttgtgactatgcagactcgggaaaagaaaaaacctggcaagaatatgctgcagccgtggcggctgggtacgcaaaggaacttttgggatgtgtccagcccagtgttgttgacgctgaagattcagcaaaggccatattagaaaagggttagtgcctacctacctaaatctatcatatacagctgtctaagtaccaagaaatacccgagacgtataaactggagttcgagaaatattctgactgcaaatagtacatcaggggatcgaaagcgtacagcggacaacagctgcaacgagagctactactgattcaatcagatctgaccttcataccgataagatcaagcgctggctttgtgctccggatccatcgtcaaacatcagccatgccaggacgctccgccatgaggggactggcgagtggctgctcgaatcccccggtttccaagcgtggcgctcggggtcacgtcgacatttatggctgcacgggctcgcggggtgtggaaagtcggttcttagtgcgactgtgcttgataatctcacgaacggaaacgacggtcttatccttagcttcttctttgactttagtgacgccgcgaaacagacattggaaggcatgctacgctcgcttgctttccaactttacgacagcgggctggactctgccaatcatctcgatacttcgttccaaacacaccgagatggcagcgagcaacctacgacaaaggtgctctggggtgttgttttcaagatgcttgtagcccagaaaaaggtctctattgttctagacgcattggacgaatcaagaacaagggaagctgtactcaaatggatcaaggacatggtattaagcccagaattggtccatgtccagctccttcttaccggtcgacctgaatccgagtttctgcgcgacatcccccccttgatagggaggcaaaactgcctaccacttgacaagcaagctgtcaactccgatatccgatcgtgggtcacagcacaactttctcaacggagtgattttatacaaaagcccttgtctcagaaactcctggaagagatccggaaaaaggttggcgacggcgccgacgggatgtgagatattactgcttcggtcaatatatttatagcttactgacgacttcatcaggttcaggtgggcattttgtcagttagacagcctgggtcaatgtccttacgaggaagctatagaggaggctctcgaatctttgccacaggatcttgataagacgtacgagcgcatgtttgaaagcataccaacgaagcttaaaagtgacgctatacgactccttcagttccttgtgcactccaagcgacctctgacgctggccgaggttaaagaagtaatagcgacgaagattgaaaacgactcgcaagggttttacaagaaacgtcgattattttgcgagaatgaaattttggcttactgtcccagcttagtgacagttgtccatactgatgttgaagagttatatcttgcccatttttccgttaaggagtaccttctggaaaacgattgtttcaagactgtggctgccagcatttctatcacgaggacgtgcttggcgtatcttacagatataaacggtagcgaaagagagatgatgtagcattttccgatggcaagatatgcggccgaattctggacctgctatgctacgacggctgaggcccacgaggagattcttcaaataatagtcaggttcctagaagaggaagcgacatttcagcgatgggctcgtttgcattaggctgataggagttgggacaaaagccctggtgcgccgcgaggctctaggctctactatgcttgcttgggtgggcttgtggaacctatacggaatcttgttgacaagggagtagatgtcaacgcgcagggcggcatgtatggaaacgccctccaggctgcctccgagggaggccatcaagagattgtcaagctgcttttgaccaagggagcagatgtcaacgcgcagggcggtgactatagcaacgctctccaggctgcctctcatagaggccatcaagggattgtcaagctgcttttgaataagggagcagatgtcaacgcgcagagcggtgactatagcaacgctctccaggctgcctctaatggaggccatcaagagattgtcaagctgcttttgaccaagggagccgatgtcaacgcacagggcggcatgtatggaaacgctctccaggctgcctcctttagaggtcatcaagagattgtcgacctgcttttgaacaagggagcagatgtcaacgcacagggcggcatgaatggaaacgctctccaggctgcctcctttagaggtcatcaagagattgtcgacctgctccaaaggacaggcgctattacaatgccttcaccatagtccgcctctacggctcagaggagcctagccgagaaagcttccctcaaacactctggaccttccgatcacactttgtaaattcttctatgtcacttctactatgtatagtgttcctctatagcctagcttcaagcctcatcactattatcatctcgaaaattttcggtctccatattttgatacataactagtaagaatcccggatactgcgttttccaagtacagtaatagtccattttcgccccgatatatattgcatcagaaatccatatgttaaattaaggacactcccgctaggacccagacacaagatggaatcaagattgcactcaatctatacgacactcaaacaccgtcgacaatattcttagtctacctaagaaattgttacgtaaaacggatttgatcataagtgatgtctcgaaacaagtcggcgtcggctaatttgaaccagggctggaggttacccgaatactcaagttattaactcctcgaacattccatatttagcaaacgaacatgtgcaatgtcaatttgtagttaagttatatattctcgtatatcccaaacttcaggaccaatttctgccttgagtttgaacttcgaagaggtgttatcctgttgctgatcaccttactacacatgaagcgagaatattagctacatcgttcgacgctgtccttaccaaatatagggatcaacggagttgatgcaagaggagagtgtaccgtagcacaaagggcagacttgacgtgatgatgtgaaggcgtgtttcacgtaatttacaaactcgagacacgcataatacgtgctttcaatacaaaacggcatttgaaacgaggctaagcatgattccgattagcgtgttgagaaggagggttcgagaaagaatctgtgcgcgagcggtgaaactgatttcgatccgccctgtatcccgggggtaacggctaggaatgcgtaaaggataaggcatggcatcatattccctagtacaaactacattcaattaatagcaaaaagcttggtaataacgagagtcctgcaattttctgccttggctgcaagtgataaattagaaagagaaccagagtctcgcttaggtctccgtttcttgtgtcaaaaatccccagtgtatgattgtatccagataataaggtataagatactaagtccgactgtctgattccacttgctgaaagaatgtatgctatgtgttgttagcgtgagactaaatgatattgaatagtagcctaacctcaaatatatatgaatataatgatgagccaatatgctctataaagtgggttgtatacttcgacagcctacaggcagcttttctggggatgttttcgggattttttatatatccatgtgaatcacccagttgaagcaatagtgagctaacattttcacgattaagatctatagatgtggtactattattaattatgctgtccccaatatttgctagtgggcttagtgttctatctatataggataatgttgtgtaccacttacctatcttaatagctctattggagtatagaatgatattattgcacttgacgcccctgtgggctatgtagagctgcttgtggatgtatttaaggcccctaagaacacttctgtagatgcttgccagatctttctcacttaattctaaggtgggagttaagccgacttgtgtaagattgatagcgaaaccatggtaattgtaaataaagtgagtagatatgctattatagaaagcctctaccaggcccactacattttcatataacgcaacttgcagtttggagaagctagcgccctatctgccggcgtctcttcttttaattaagacggttgagtacctaaagtagttgctaaggcttagctatctgtaactagcctgattgatcttctaattcaaagaatacttttgggaaggatgcctaaggtggggtaaaccatacctagatagggttttaatatcaagatcttagtagaaagtgtgatggaaaaacttatatcttaggaatatgcctattgtagctgagactttccaatttgtagctaggatcattcttagcggtagctgttaggaaggaactatttaacccgttaggttgagatatctttaccatagtaagattggctaaggcttttttttctcccaccgatggcaaagagggcatgctggcctgctttatctttattataatagctctccagcagatataggccatttgcctagggtgtaagcgaattatattttgtccggggttatcgatgatttccgaagccatagtggggatgagctagtgagtactgtggtaaggttaatttcacgtttatccttaagaactaggctaaagctctaggcgctcgaaaacagcagaattgcacagacgcaagtagggtcgcggaaacaaaagtacagctgcagatataaaagtagagccgcagatataagagtagagttgcagacacgaaagtagagtcgcgggcacgaaagtagagccgcagatataagagtggagtcgcagacacgaaagtagaatcgcggacacgaaagtagaatcgcggacacgaaagtagcgtcgcggactttctccacttttcgccccacaaaaagctgacaggcactagcccaagctagcaccattacaacttagggttatagggatttgattatgtacttgattttctaccaatcctaactggctaaggcccgctgtattatggttcttatataccgctaggaaagaagcaaataggaagataaagacctataaatccgaccctagtatatgctaaaagtagatgaataagtttctgggcttttcactgaaatgacttattttgctatcacttgttttctaacgataccggaggtaatctacggtgtagtcctcggtcttatggctctcttatttgcattgtactgtcttacattatatatattctcattcttattaacctctcctttcttgtcttcttgtgttcgaccgtttctattgtgctatgtgatttatgcccgatcctactggcatttcgccggtcttggaagtacattaagaacctattcattgttgatagttctttattttgccggcactggtgtctgcaatattgtgcgggtctattccgtttaagatgctagtaagagggtagcgaagctctcactcattaacttatttctaatgtttttgggcggtggttacgagtttagcgcttgtcttcttggagtttccctccattcctatggattcctttatcgattatttgcgcttgtagctctatttgaagctctagcttatattataatcgttgctcgatcaagggcgatatcttaggcgaacgagatgcaattctatggtctcctagtacgttttcttagtgctcctaaaatgtagatggatactgaaattagcaaggccgctagtatgtttttggctttggtaatattgctattagtgaagaaaagggtttatgaagtattccttgtcacctacattggatgtgcggtgacgatgatctacggagtgtggcagtatatccggttggctgaagggaatttttgggtattcctactagtgttcgcatgcaccctggttattataggggttttgcagctaattcgtattatctattgtaatgtggtgataggaagaagctatatatgaatgaatctgcaaccctatatgggtgatattgctcgaatgatactattattgcctagaccgtaggtcgtgcgcgccggttaacgtattaacctaggagttccttctgtgggtatcttttatattttttaatcatacccttttgctattagctggtgggagaatgatgttaatggctgggcggttttaatcttaatcttgcttcgtcctcgttccggtttcatgaagagactcttcgatcgcattgagctaaatagagaatgtagggcctggattgatggcccttttggtctgtcatctgttagttagagattaaactgtaatgtcggcgactatagatatgttttcatgattgctaccggtatcggcattgcggctcagttgctatatattaaggagcttctcgatggccatgaaaaggctcaagtatgtatataggtaatctcgcttgtctggtagttagatagggttggtgattatgagagcgtatgagacctactctagaccctcgttaggtaagataatggatacgttcgtgtctatttctatattggcgataccatctacttacgctgagtagatgctttatgtctcaatttacgatctactacgtgcttacttagaggatgaaattcagtatattggtgagaatgggctgatagatgtacgtagcggacgtgtcagctgggaaaagcagcttgatatagagataggaaattaaatagggaaaatgattgtcctaggtaagccctgttctctccctttattatgaaacgagttcttatcttaaatcagtatgtgtataagtacaaactcggtataatatcaggaacttggtcaggtcacgtgtagataagaatgtcgagctattcgaacctgagttccagccttggggttaaactggaagcttacgcgccttccttaggctgtgagaaaacgaaacgaatataaagacgctagagaatagggtaatgtataatattaggtattgcgaaagtgtagagaaggaattcccatgaatatatagttactttgttggccaaaatctaagtacttaaatacggtggaatagaaaagagtgttctttaatttagtctcttagctaaaatactggatttgtataaaatcacttatattgagaaaatttaccgaccggctaccttcaaccatatttagctgtacgtccggtgcctaacacgtcaataaatgctggagatatgtgggtaatttagccgatcgtaactttaaagtatttactaaatctccaccctgtgatactaaaaatatatccgcgaatgcagggtgcctaaggcgagtattagtcatcgaaatataatccttaaatatataaataaggacagcacttcggatataaagtgttaatattatatttctacttttacaactagtttagaatggcatccaatttgaatcgggagaagcgcgaaacttaatttcctaagaaactgtggcccgataatggaagtatcgttaaggaaagtaccgaaatcgagaaacctaatgagaaattggtctaaaataattatgcgtatcgacttggggtccctattattctaactgaaaatattaacagcttatcaactgtcaaagtagaatcaccggtacagtaccatctatcttataacattgatcaggtaggcctaggcgtgatagggcttaaagatactgagaacctacctacctactttcttaagtagtgtagcatttaaaatacccacgcttttagacgactttaatctgttatacaccaaaacttggtgtgtttgatagaaggcttttaatctggagggaagttctatatcgtatacgaatattatcatttggctattagccttggttgtgtagtaacgaatgttcgcttcagtgaagtagatatagtaactatctgtaaggagatccttagaggggttatttttatctactacgagttgaagacctcttgtcccttgttagattgtagtaatatacttctcacattgaaaggcgaagtcaagataggtataggacttgatgaatatgatgaccaactctgaccattagatagtaaatataggggagtgtttaatgaagaggagatcgggcgacggcattaaagaagacattgaggctattgggtctatcgtgactttattaagtgaccgaccaacttatataggcgaccctaagtaaggcctgggtattctgtctctttctaagttggcgcagtcgtttgttgagaaggcgaatacttctagttctgtagaggatctactaaaggtcagtattatttaaactgaagatgtgaatatataataatagatcgaaaggaagagtttctttatctggtaaacctagggggatgttggagtttaaagcgttattactactaggcatttcctttaggaatctgcattggcaaacgtgttaatgacgtttaccttgacgggatgtgttggatataatataccctaataaattagctattaggaatatgaggagctaagaagaatattaattactacgttcgcaaatctctatctgtcggggctactaaatgtgcaaacgaaatagaacttcgtctgtcgggactataattaaagggatagaaagctaaaaaaatatttgtggtgctatttttgtgtcctacattgttcaccaggaggattatccacggcatgaaggggtctatattctgtacttcgtattctgacatggacatacaactatagtggtgagccgccgtacttgcaatctagactcctgtgctccgattagttcacctgactatacggcttataagcatctatccggtatgttccaagcatggaaggcgatgttgagcgctatactaagataaaagatagtggggcgatacgaggcctgtcggaatttattataggcaaatctgggggtaaagcatctgtcgcagtacctactaggtgtgctatgtagtacgccactatggtgtcgtcaactactgccgctgtctgcttagaggcgtaatcctttagataagagtgaggctcattattagactgaaagggggtgtaacagtgcagataagtggcggatggagtaatatcctctatgagatgaaaaattgattgaagaataagaaaatagttttattccttataactccttatcaggtgccgtgtcctgatgacgctttcccgatcgaatgtctgtaaaatctgcctttctctttcctgtatgaatatcatagtctagaacgtaatcacggagtttatctaatgaaatcgtcccttccatgtcatttccatgacttggattgtctattttcctgataagtattaaccgttcttttaaagctgctttatataccttgttcatatccggagtgcctattccatactcattaatcactataaagagatgattacttgctagatcttgtaagactgctcgtaggttgaatccatcccctaagaagaatttgtaatagacttgtgattcgaataggtataaaacgatcacttcttgatgtgattgataccacgttgaaaggatcttaggtaccttatttcgaacggataggtagtttttcgtttctattggttgagacgtttcctcgaaactagctgccaacggtggagcatcatgatcgggagttccacttgggtgattagctaactctattggcttactggtatcttcctctactaactctggtccggagtttattgagggctggggtgcttccgaaggcgatggattcacgggttgaacttgtagatgccactcttcaaaatctatattagtattgatagatcctagcgcggtcttagtaagccttatgagactttggatagggctagcttgtcgtttatctaagattggctgaaaaaatgaacttttgccgaagaacgacctgataatgtcttttaccacgccgagtgacgttatatattctgacggtggctggttgggaccaaagatttgattgtaaaaaatgtttctgcgctgctacagatactcgtctcgtgttgggctgttaaattggtggcttgcttcgagttctgggttatttgttgtgaattgggctgtactattgtcctccgctagatacctaggaaggttctgtaatatgctctgaagtctatttgatatcgattgtacctttcgctctttgtatttgtagaactcctccctactaagagattcgaaaaagccttgtgctatatgttgccctagatttctgcttcgaagctgcctaatttggtccgactcaaagcctaatcgcgaagctaatatagtaagcttacttaggcttatatctatagtggaacattcaaattgttgacgaaaatttcttatgcggcctccttggtggacgaaatgcctgtaagcaaaaagctaaagctgtagtatagatacaacgaacgggtattcagtttgttgtattgttgtgaatttgtgttctgttgtctggactttaaggagacctccagttccgataagattccattgagtaagtataacttttcgaaggttttgtttgaattttagaggatagagacagtggagcgctcttgctggtctcttaataaacagtgtatcttggataagcgtagtaagggataatattctcctaggtgtttggagaaggcgactcttaaggacttccctgtattgagttgctctaagaagaggaaatatcttttttgaatccataagatcggtgatacgttttcggtctgccacagcgatgctaggtattaatcctttaatatgggatatggaatccgagtcgataagctatctgtcctaagatttaagaaattttgtctatatttctaggactatgtatagataatggtttagtatctaggaagttagctatgtgcgaggtatgcgattatcaaatatacctctgggcattttaggcctaacatcctggtgatttgtgaagattgtagtggcttctatagcctaacgtatggtaataactcgtctaaaatacgacgctgttgatcgtcatgttgtaagcgttgtatttgtttatgacagtcttcggaaccaagtctagtctaccatttctgctcctgagtagggttttgtgaaatttggtatgacctgagtgtacgatatatttcgctgacagtgaagcttatactttgtgtcgattcttcgtgtaattgggcgagtgtatcgattgagatatctataacgttcttagtctctattcgatatttttcaatgctgccctaccatttagataaagatcaaccagccatgtagtttctccaaatctctcgctagcttttagacgatgtttcctgtatacacaagtaatgatatcctctccttctaataggagatttggctgattttttggatcgataagtgcttctggggtgagatttgattttgcaagtgcttttcttaggacctcctagttaatagtcgcggcaactctgtgctcaggctctaggttaccatagccttcgatttcaaatatcctaaaaagtttctccacatttttctcggcgatctcttgggttcccgtgaggttatactctttatatctaagatgctgtaactttatgattgcgtatccctaataacattgtagccgttgaagggcgagggtgtttgttcggtgaccaagaaggttctcgcttgcttccattctcttcttattttgctttaaatgaaagaggagaaaaatcttgacgaagatggaaaggagcgccataataattttaaatgtacctacaacactcaaacccgtgtcgcgctttgccgactccagcgggcnnnnnnnnnnnnnnnnnnnnnnnnnnnnnnnnnnnnnnnnnnnnnnnnnnnnnnnnnnnnnnnnnnnnnnnnnnnnnnnnnnnnnnnnnnnnnnnnnnnnnnnnnnnnnnnnnnnnnnnnnnnnnnnnnnnnnnnnnnnnnnnnnnnnnnnnnnnnnnnnnnnnnnnnnnnnnnnnnnnnnnnnnnnnnnnnnnnnnnnnnnnnnnnnnnnnnnnnnnnnnnnnnnnnnnnnnnnnnnnnnnnnnnnnnnnnnnnnnnnnnnnnnnnnnnnnnnnnnnnnnnnnnnnnnnnnnnnnnnnnnnnnnnnnnnnnnnnnnnnnnnnnnnnnnnnnnnnnnnnnnnnnnnnnnnnnnnnnnnnnnnnnnnnnnnnnnnnnnnnnnnnnnnnnnnnnnnnnnnnnnnnnnnnnnnnnnnnnnnnnnnnnnnnnnnnnnnnnnnnnnnnnnnnnnnnnnnnnnnnnnnnnnnnnnnnnnnnnnnnnnnnnnnnnnnnnnnnnnnnnnnnnnnnnnnnnnnnnnnnnnnnnnnnnnnnnnnnnnnnnnnnnnnnnnnnnnnnnnnnnnnnnnnnnnnnnnnnnnnnnnnnnnnnnnnnnnnnnnnnnnnnnnnnnnnnnnnnnnnnnnnnnnnnnnnnnnnnnnnnnnnnnnnnnnnnnnnnnnnnnnnnnnnnnnnnnnnnnnnnnnnnnnnnnnnnnnnnnnnnnnnnnnnnnnnnnnnnnnnnnnnnnnnnnnnnnnnnnnnnnnnnnnnnnnnnnnnnnnnnnnnnnnnnnnnnntctagtgcgtccctactctccagtgtgtccctactctccagtgtgtccctactctctagctcctgactaccgcgtctactcgccgatagacttggaaaaatgcgacaaataaccagagtgctgaaaataccctatcatggttagtctgcccccgaacccccattcttagcagtgttccagtacagtggtaaataacttagagtagcgtctgtattagactactgtactgtagtaaggtctacaaggattcaagttgcttagtggtactccagtcagagatatggaattcacatgtataaaagtgcagaacagatacgtactacagtacgttgcgaaaccggtgcaaccgccttcactcttcgagtgtttctctaggcgcaccgccaagataccctagaacatatgaggaatggtcccggaatatcaatattccgctagcagtctcgttactatcatttcctttcattaaatacgatgccttgtctcacaactgtattggtaattcttgagcagattcaaataggccaaacaccagagcaggggtttgtctcgtgaatctggtgaatctcccacatcctttgtcgacttgcgaatgtccctcgttgaacagaagatcacccacgggcagtagttcattattggatagaaatgtaacgttgcactatatctgtctataaaactttcgaatctttgaaagcctggagtttttggtgaacacgcacgcttgtttcttataaattctggactttcaatcattggacctcaagaaccgggaggagatgtatatacatatattgcacattgggtccgacactaatccctgcagtttataacacaggacctaattattagtctacgaatttctttcgttattcgtagagatatttgcattagaaggcagcccctgcctaaggcccgggccgaaaaaataggaaagcggagagcgagcaaactatttgcctgatggctagattaagatttatcaagcgaatcagacggggtattcaatatttcatgaagtcaccctactcccgcttgctccactggaatgtaggacatgatcgagatgacgtcacaacagtacgtacagccttagaaaggcaggaaagaatttaacagtcaattggctagcaatgtaaacttctgtaacaaaacgtgcgaacgatcagttttttcggtatacaatttcgaggtctgcgcgcagagcatgctcgtgctagagctcatgagggcccgtcacagtgctatttccttccctcaatagattgacatgatggagagcgaacttcgtgacaatatttgcgcacagcagttagcagatgtgctcccggtcggcgtggcgatcgtcaacgcgcacgacgagattgtcttcgccaaccgacgctttcatgagcttacgaggagccaccaaccaataggactggactgcctctcgcagtcggtccacgcagacgattatgagcatatagcccaggcatataatgctgcggtatatacgaagatggcgacccggagagaataccgggcttttgggggagcggaggaatggcgagggctgtcgctgacaccactaaacgacgacgatttgaagcagttcgagctaaacggtgacggcggtctgatttgtgtcattagtgatatcacaccggagaagacagcagagatattgcagaggaagattgcgaatgatgccaaagagcggaagcagcaacaggaacgctttatagatatgataagccatgaagtgcgcaatccgctctctgcgatcctgcattgtgcggaggatattatggatattttgcaggatggagcgcaggacgatgggaaagagaagatggccaagattgccgaagccacagagacgataaatctctgcgttgcacaccagaaaaaaatcattgacgatgtgttggtttactccaagctagatgcgtcgatgctgaagctagccccacaagaagtccagccaaagtcgcatgttgcaacgctgctgagcatatttcgccctgagctgcgcaagcagcagatcgaattcgagtaccttcttgacacgtcttacgcagattgcgacctcgactgggtcgtcgccgatctcgacaagattggccaggtattagtcaatcttgtctctaacgccataaaattcactgccgaatctcaaagtaagaggaatattcgggtctctatgggagctgcgaaagtccgaccgccatcatacccgccaaatatcgtctttttcgagccgaacgaagctgctttgaagcttgattgtaccggaggccctgaatggggccatggccagactgtgtatatcatggtcgctgtgaaggacaatgggatcggaataagtgatcagcatcagaagctgctattcgagcgcttcaagcaagctaccccgcgcacggacagggtgtatgggggctatggcctgggccttaacatcagccgcagactgtgccacatgcatggaggtgagattggtgttagctccaaggaaggcgagggtagcacctttggattttatttcactgtccgacggtgtcccgatacagacaacgccaaggtggacagagagtctcctgttgacaaactgtgccatcaggttcgggagctcgacagtaaaatcccggacatcagaagagacacgtccatggcaaatttttctgaagaaccgccaataaagcacgtcgatgaggtcgcgatcggcactgagagtgacgaccgaagagagcactcagcgaagctgtcagaagccgctatacgagataacagccctgcaatagatcggcgcatgtcgaacatcgacaaattttcacccaaacaagagcccaaggctataacagaaatgtctaaactggaggaaccacaacgcattctatttgtcgaagataacgtcatcaaccagcgggttcttgcgcgcaagcttaagacagcgggatttgaggtcaccacggccaacaatgggcaggaagcccttgacgcgtggaagcacgattcatttgactgcattctcatggaccaggaaatgcctgttatggacggaagttcggcggcgcgagagattcgggcgctggagaaggacaatggaacgcatacccccatattaggggtcaccgccaacgtgcggcagaaccagcaggcagatatgctggatgcgggcatggatggagttgtacagaagccgtacaagatgcaggatttatgtgacaggatccgtcacttggttgccgcaagagtcggtggaggacactcgcagagtcatcgcacatcatagtcgaggccatctagtttcgggggaaatgcaaagcacaagtaaaggaataacatcggatgtccctttatgtgccaatatccacatttaggactacgaataaaattccgccgagaaaccacaaccaatcataatatacaatcgcttacggatgtgccttgtcaaacatttcgagttgcaggtactactgtaattacctagattcgtaatgtcggactttcggcaccgttgacacgaaggatgttggccagtatattttgtcttctgttcactttataattattgttgttgttctattttatgttttattttgctatatttaagtgtcacatgcccggctgacttttcttctagaaatgaaacagtcgaaattcggtccccgttgaatatcaattttatccaagttcaaagggtgtgtagcatagatatccatgactgggagggtcgggcctctgaacagcaatcggtcctcatttgacccaaaggtttacggatcactgttaagctctaggtatgttatagcaacgagtgacttgcctagtagtctaagatccctacttcaggagttggaagcggacctctcatcatagtctattagctatcactcgaggtttccgagcttctttatcaggtggtttctctaggacgctgtccagatatgagtcgagctaactaattattatgccggtaaaagacgggaagctgttagggaggggtaagcgaggtgtcaggtgtatgtattaaatttacaaatgaatacatttcgaaaatcatttatgtacagaacgtgcgtatgattacatacgcagctcccggtataactccaaatatggactagcgtttcctggcgtaaggagcaggaaagtcaatcgaagagtgaggtggttgcaccggtttcgggacgtactgtacagaacttagactcatgacagtgttcttatgccaattcctcctataacctaatatctgacaatcttgcccttagtcggattttctgatccgccccgccttgagaactcgaaatgagactaatatataccaacaccaccaaatagatgaacacacaagcccctattatgttgcatagattcgttgatgcgttggcattcgcgagaagtaacctaaaggtcccactcctgctttgcctaaataacacgtcttttaaatatgaaatgatccttcttcttgtagatgaactctcgctgatccttcgatgacagaaggttggtttcctctaagcaatttgtgcatagtgtattgatgttgatgcgccgcttagcagggagtaaatacgaccaaacgcaaacaaaataggatccaggctcgtttcctgtgaatttgatcttcatgcgatgggaatcaatatcatgacaagacacgcaaaaccaggtgacagttcccttcattctaggcgatgttagcatgtatagtatttgctagatattatcaaaacttacgttcaagcctaacggactttgggatacgtgatctaagattaatgcagaagaatacctgccttcatatgtctaaatcaggctgtagactaaaaaatcatcaaactgtacgagcaatttataggatagcgctaatacttgagtttatagtgcgattcctagagcagtaatcctaatctacctgagtaccatgccgctacagataggtatatgatggtccgtgtcacgatcccacatatctgtctagacaaagctacatatcagggggtagggatgcaagctggcttaggagctaaaattaagtcaggaattagtgggacctcgatttaaaaagtgtgttgtaaagcatgtcgcaaagcgtgtcgtaaagtgtgtcgcaaagcgtgtcgcaaagcgtgtcgcaaagcgtgcnnnnnnnnnnnnnnnnnnnnnnnnnnnnnnnnnnnnnnnnnnnnnnnnnnnnnnnnnnnnnnnnnnnnnnnnnnnnnnnnnnnnnnnnnnnnnnnnnnnnnnnnnnnnnnnnnnnnnnnnnnnnnnnnnnnnnnnnnnnnnnnnnnnnnnnnnnnnnnnnnnnnnnnnnnnnnnnnnnnnnnnnnnnnnnnnnnnnnnnnnnnnnnnnnnnnnnnnnnnnnnnnnnnnnnnnnnnnnnnnnnnnnnnnnnnnnnnnnnnnnnnnnnnnnnnnnnnnnnnnnnnnnnnnnnnnnnnnnnnnnnnnnnnnnnnnnnnnnnnnnnnnnnnnnnnnnnnnnnnnnnnnnnnnnnnnnnnnnnnnnnnnnnnnnnnnnnnnnnnnnnnnnnnnnnnnnnnnnnnnnnnnnnnnnnnnnnnnnnnnnnnnnnnnnnnnnnnnnnnnnnnnnnnnnnnnnnnnnnnnnnnnnnnnnnnnnnnnnnnnnnnnnnnnnnnnnnnnnnnnnnnnnnnnnnnnnnnnnnnnnnnnnnnnnnnnnnnnnnnnnnnnnnnnnnnnnnnnnnnnnnnnnnnnnnnnnnnnnnnnnnnnnnnnnnnnnnnnnnnnnnnnnnnnnnnnnnnnnnnnnnnnnnnnnnnnnnnnnnnnnnnnnnnnnnnnnnnnnnnnnnnnnnnnnnnnnnnnnnnnnnnnnnnnngagctgggaaagtccgcccgccatcatccccgccaaatatcgtctttttcgagccgaacgaagctgctttgaagcttgattgtaccggaggccctgaatggggccatggccagactgtgtatatcatggtcgctgtgaaggacaatgggatcggaataagtgatcagcatcagaagctgctattcgagcgcttcaagcaagctaccccgcgcacggacagggtgtatgggggctatggcctgggccttaacatcagccgcagactgtgccacatgcatggaggtgagattggtgttagctccaaggaaggcgagggtagcacctttggattttatttcactgtccgacggtgtcccgatacagacaacgccaaggtggacagagagtctcctgttgacaaactgtgccatcaggttcgggagctcgacagtaaaatcccggacatcagaagagacacgtccatggcaaatttttctgaagaaccgccaataaagcacgtcgatgaggtcgcgatcggcactgagagtgacgaccgaagagagcactcagcgaagctgtcagaagccgctatacgagataacagccctgcaatagatcggcgcatgtcgaacatcgacaaattttcacccaaacaagagcccaaggctataacagaaatgtctaaactggaggaaccacaacgcattctatttgtcgaagataacgtcatcaaccagcgggttcttgcgcgcaagcttaagacagcgggatttgaggtcaccacggccaacaatgggcaggaagcccttgacgcgtggaagcacgattcatttgactgcattctcatggaccaggaaatgcctgttatggacggaagttcggcggcgcgagagattcgggcgctggagaaggacaatggaacgcatacccccatattaggggtcaccgccaacgtgcggcagaaccagcaggcagatatgctggatgcgggcatggatggagttgtacagaagccgtacaagatgcaggatttatgtgacaggatccgtcacttggttgccgcaagagtcggtggaggacactcgcagagtcatcgcacatcatagtcgaggccatctagtttcgggggaaatgcaaagcacaagtaaaggaataacatcggatgtccctttatgtgccaatatccacatttaggactacgaataaaattccgccgagaaaccacaaccaatcataatatacaatcgcttacggatgtgccttgtcaaacatttcgagttgcaggtactactgtaattacctagattcgtaatgtcggactttcggcaccgttgacacgaaggatgttggccagtatattttgtcttctgttcactttataattattgttgttgttctattttatgttttattttgctatatttaagtgtcacatgcccggctgacttttcttctagaaatgaaacagtcgaaattcggtccccgttgaatatcaattttatccaagttcaaagggtgtgtagcatagatatccatgactgggagggtcgggcctctgaacagcaatcggtcctcatttgacccaaaggtttacggatcactgttaagctctaggtatgttatagcaacgagtgacttgcctagtagtctaagatccctacttcaggagttggaagcggacctctcatcatagtctattagctatcactcgaggtttccgagcttctttatcaggtggtttctctaggacgctgtccagatatgagtcgagctaactaattattatgccggtaaaagacgggaagctgttagggaggggtaagcgaggtgtcaggtgtatgtattaaatttacaaatgaatacatttcgaaaatcatttatgtacagaacgtgcgtatgattacatacgcagctcccggtataactccaaatatggactagcgtttcctggcgtaaggagcaggaaagtcaatcgaagagtgaggtggttgcaccggtttcgggacgtactgtacagaacttagactcatgacagtgttcttatgccaattcctcctataacctaatatctgacaatcttgcccttagtcggattttctgatccgccccgccttgagaactcgaaatgagactaatatataccaacaccaccaaatagatgaacacacaagcccccattatgttgcacagattcgttgatgcgttggcattcgcgagaagtaacccaaaggtcccactcctgctttgcccaaacaacacgtctttcaaatatgatttgatccttcttcttgtagatgaactctcgctgatccttcgatgacagaaggttggtttcctctaagcaatttgtgtatagtgtattgatgttgatgcgccgcttagtagggagtaaatacgaccaaatgtaaataaaataggatctaggctcgtttcctgtgaatttgatcttcatgcgatgggaattaatatcatgataagacacgtaaaaccaggtgacagttccctttattctaggcgatgttagtatgtatagtatttgctagatattattaaaacttacgtttaagcctaacggactttggaatatgtgatctaagattaatgcagaagaatacctgcctttatatgtctaaatcaggctgtagactaaaaaatcatcaaactatacaagcaatttataggatagcgctaatacttgagtttatagtgcgattcctagagcagtaatcctaatctacctgagtaccatgccgctacagataggtatatgatggtccgtgtcacgatcccacatatctgtctagacaaagctacatatcagggggtagggatgcaagctggcttaggagctaaaattaagtcaggaattagtgggacctcgatttaaaaagtgtgttgtaaagcatgtcgcaaagcgtgtcgtaaagtgtgtcgcaaagcgtgtcgcaaagcgtgtcgcaaagcgtgtcgcaaagcgtgtcgcaaagtgtgttgcaaagcgtgtcgcaaagtgtgtcgcaagtgttgcgtgtgtattgccacggtttttatcacagtgtatcaggagatgtgtggacatttaaattcgcagatatgccgcacaaaatcgtcgcttttcacaatagcttaaggctggagataccaatccgtctatcatccttcaatccttataaatattggaaatatgaccttctctatattcctacttcttactagcgtctatatacgcgctgccttaggtggtagtctcacggttatcgattatgatcgcgaatgcgtggtatggtctgatgataactatggctgcacgggatatttatcatcttttggcctccttgatggagacgattgttctggtgtgtaatggttctaccgatatactattagtactgatgaaaccctagatctaagcatggttatatatggtatccgtaaggactactctaagctcgatataggcgtatacagcagcacgaaagacaacatcatacctattgcatagatagatataaacgaaaatgggatggttaaattctataaccaaaatgaagacgagatagggtgtacattggataacggatttaaggttggcagcttgtgtattgcttccgacctgtctttaccgtctttatcggcggctttatcggaatctgcaccttctacatcggcatcgtccttatcggtatctttatcagaatcgtctttatcggtatcgtctctattatccacttcagtatcatcaagtgaaatatctagctgtactaactctggataagatgattatcgggtgactatgcaaatggccttgtcccttagaatatcatttatgatatagctcatcctcccgctcttggattgaacgattactcttactttcttttcctacttagatagaaccgcgttacctgaccctatagtgtacagagaaaagatcgatagtatatagatctctttggatatggttttgcctaccgggttttctatatcactagcgtgaatacgaaagagacttcccttactttttgcttctctataaatgttatagcagttgagcctagtgacctcgttttataaaaccgggttttgcaagtggatgcgcttgattggtgtagactgtcgatctggtaattaggaaatgagactaatatataccaacaccaccaaatagatgaatacataagcccctattatgttgcatagattcgttgatgcgttggcattcgcgagaagtaacctaaaggtcccactcctgctttgcctaaataacacgtcttttaaatatgaaatgatccttcttcttgtagatgaactctcgctgatccttcgatgacagaaggttggtttcctctaagcaatttgtgcatagtgtattgatgttgatgcgccgcttagcagggagtaaatacgaccaaacgcaaacaaaataggatccaggctcgtttcctgtgaatttgatcttcatgcgatgggaatcaatatcatgacaagacacgcaaaaccaggtgacagttcccttcattctaggcgatgttagcatgtatagtatttgctagatattatcaaaacttacgttcaagcctaacggactttgggatacgtgatctaagattaatgcagaagaatacctgccttcatatgtctaaatcaggctgtagactaaaaaatcatcaaactgtacgagcaatttataggacagcgccaatacttgagtttatagtgcgactcctagagcagtaaccccaatccacctgagcaccatgccgccacagacaggtagatgatggtccgtgtcaagaccccacatatctgtctagacaaagctacgtatcaggggtagggacgcaagctggcttaggagctaagattaagtcaggaattagtgggacctcgattcaaaaagtgtgtcgcaaagcatgtcgcaaagcgtgtcgtaaagcgtgtcgtaaagcgtgtcgcaaagcgtgtcgcaaagcgtgtcgcaaagcgtgtcgcaaagcgtgtcgcaaagtgtgttgcaaagcgtgtcgcaaagtgtgtcgcaagtgttgcgtgtgtattgccacggtttttatcacagtgtatcaggagatgtgtggacatttaaattcgcagatatgccgcacaaattcgtcgcttttcacaatagcttaaggctggagataccaatccgtctatcatccttcaatccttataaatattggaaatatgaccttctctatattcctacttcttactagcgtctatatacgcgctgccttaggtggtagtctcacggttatcgattatgatcgcgaatgcgtggtatggtctgatgataactatggctgcacgggatatttatcatcttttggcctccttgatggagacgattgttctggtgtgtaatggttctaccgatatactattagtactgatgaaaccctagatctaagcatggttatatatggtatccgtaaggactactctaagctcgatataggcgtatacagcagcacgaaagacaacatcatacctattgcatagatagatataaacgaaaatgggatggttaaattctataaccaaaatgaagacgagatagggtgtacattggataacggatttaaggttggcagcttgtgtattgcttccgacctgtctttaccgtctttatcggcggctttatcggaatctgcaccttctacatcggcatcgtccttatcggtatctttatcagaatcgtctttatcggtatcgtctctattatccacttcagtatcatcaagtgaaatatctagctgtactaactctggataagatgattatcgggtgactatgcaaatggccttgtcccttagaatatcatttatgatatagctcatcctcccgctcttggattgaacgattactcttactttcttttcctacttagatagaaccgcgttacctgaccctatagtgtacagagaaaagatcgatagtatatagatctctttggatatggttttgcctaccgggttttctatatcactagcgtgaatacgaaagagacttcccttactttttgcttctctataaatgttatagcagttgagcctagtgacctcgttttataaaaccgggttttgcaagtggatgcgcttgattggtgtagactgtcgatctggtaattaggtgatgcccgggcaattactttactcgcaaaatgctagataggattagagcgagatttagcacttaggcctgtacttcacatatcactaagggcctgcctagaaacggtgaatgagcctgtgaaatgcatacttatagagccatgccgaggggatgtacatctaagggtgtcaggtgctactggtctatacgctgtgatttttatacggacatccccctagatgcccatccagatcgcatgatgatcgcacagttacacggaagaataccccagttgagatcctcgggctagctagaacgtgttgttgccctctccttgtgcgattgtcaaacacaatagaacagactagcgtatcttggcactagggttcgagaatccgtcgtggttgtatgagcctcgctctgtgctctaaaacttgtcacctgtaaatgaagcaaagcgcgcatcagaaggctgcaagatttgagagcttgttcactaaaggcttctttctgtacggtgaaagactaccaatctttgaacccccgacggctgtgagacatatcttttcctcgaccacacttccggcaccttacttgtaaaaccgacattggtcttctaaggccacaattctcacagtctcctaatagcggagcatcgaaaaatgtgtcgagcatttctttcacaaattctggcacttgggcggcgattgaatcgtacttcgcgcggacggatgtgtctcgtaaatggaaccccagtttgtctctcgacaagcaaacggcgaactctttgagccccttggagttgctgaatggcgagaaaaagacatcgggtattgaatcaagatactcaaaggggtcaaagtgacctacagttctgttcaaatatttccccatggccgcgtcgcaaagctcggggatgcagtatttatcgcccaaagcaaacaattgtgcatgtaatcgaagagcagatattgacaacagcggcacattaggtgagacatctgtcggactatcatcaatgagctctgaataatcacctgtgtataagtagtccagcatctttttaacgacgggaatcgattcatccgtcatctggtacgtagaatctgctgcttcctatatttaaactatgtgagatacgaagagagaaagactggcttaagagataacttgccctaaaattcccggtgcaagcggcccgaaagataggagattgcgaacatagtatgactttatgcacgccgaaatcgactccatcacacataattttgaaatcggtgtaatcgcctctttcgcgacatcttctgttatttagtaaagttttgcaatgtcgcggagaacgtactctgaaaccctattaatgatgcgctgaggttgtgatgacgaagtgttggacatggctgcgttaacagtatttggaagtaaaataggcaagattgtcagaaagagctagttgggatttgaatacttttgaaatgttttgaacgtcagactgtagcaaaccagagtccgagtatccagtaaatgtcttgacgtagtaccttctgttatgacgtcaaataacgcaacacaaatctgtgttgtctttcactgagccaaacgtgtttgatgaatcttacaaagcttttttatcatgtgactcaatattacaatacatttcgatatcttgaaattgtctaaatcaagaatagactagcgagtgtcagaattgagtttgggaaagaatttaaagagagtaacgtagtgaaactgatttcgagcgcgtctgtacctgcagactactcataaacctgctttttatatatttcgaaaatttttcaaaaaggcccttccaaacagagaggttgggaaaatcgtacactttgtagtgtcttgtcatgccagtacgtggtgtcaacaataaaggtatagagaagtcgagaaccccctctagagaagacggatgacggtgggttgctatcgtcattatctggagtgaggatagtacactactgacgtccactatcacaaaatcctatgaatgaaactctcccagattcgtgtcccaaggcaagtgtagtcccgttaatcgctgaacaccaaggccgatattcaggaggaagccacagcacctttctgcggtgaagggttatccactgacgattcagaataaatatcccggcttccccttgagataaattggaggtatgattatcacatccggactgtgttttaaggtatcccagattggtgctcagatgtgaatcatctcggacaaattccaggttggtgaccagcccgtgagcacccaaactctgtcgcagcgcgcctgtggcagtgtcccagagcctgactgtcttatcatctgagctagacgccaggagtcggccgttagaggagaatgcaacagatcggacattgtctgaatggccggagaggacctgttgcagcgcgcctgtggcggtatcccagagcctgaccgtcctatcctttgatccagacgccagatatcggccgtctagggagaatgtcacacaacggacttcatctgaatggccatcgagaatctgctgccacgcacctatagcgacattccacagcctgactgttttatcacttgagctggacgctaggagtcggccgtcaggggagaataccacagaccagactatacctaaatgacccttaagaatctgctgccgtgcacctgtggcggtatcccagagcctgactgtctcatcatttgagctggatgctagaattcggccatctggggagaacgccacagactggacacaacgtgaatgacccttaagggtctgaagtagggcgcccgtagcggtatcccatagcctaactgttttgtcgcttgagccggacgcgaggagctggccgtctggggagaatactattgaccagacccaatctgagtgaccatcgtgggtttgctgccccgtatccgtagtggtatcccatagcctgactgtcttatcttttgacccggacaccaggattctaccgtcgggagagaatgctacagactggacacaatgtgaatgaccctcaagagcctgctgcagcacacccgtggcggtatcccacagccggaccaacctatcgtttgagccggacgccaggagtcggccgtctggggagaatgtcacagatgcgacccaatctggataccatattgaatctgaatggccatcgagagatcgtcggagcgcgcctgtgtctgtgtcccagagcttgagtgtctcgtctcttgagccagacgccaggagcagacagtctggggagaatgcaatagaatggacggagtctaaatggcccctaagagtctgctgcagcgcgcctgtagcggtatcccagagtttgatagtcctatcatttgatccagacgccagatgttggccgtttgaggagaatgtaacagaccggacattgtctgtatggccgtaaagggtctgctgtagcgtgcctaaggtggtatcccagagcctgactgtcccatcatttgatccggacgctagatgtcgcccatcaggggagaatgccacggactggacagactcggaatagagatcgaaagtctgctgtagctcacccgtagcgatattccatagtcgaaccgttttatcacttgagccggatgctaggagtcggccgtcaggggagaatgccacagactggacagacttggaatggccatccagggtctgctccagaacacccgtggcggtatcccacagcctgaccgttttatcactggagccggatgcgaggattcggccgtctggggagaatgccacagattggacgcactcggaatggccctcgagagtctgcatttctgagctccagatttcctcaacctttggaaacctacatatccaactagggagctcttcttcaaattccctccgaactattgccaatctaggtgcaaatagaagtcctgagtgataaagttggaggggcgcctcatcagcgatatgtctatttttaaggacaaaccgcctgccatcatgtagaagattggttattttataatcctagtcaccctatattagtaacggcatgtaatcacataggttttcctatagaaactgacacttatcaccagctgtaattgatcgatgatctccagaacttctgacacgacgcctagaatgctcattgcttccatccaatgtatgaaatgctcccggagaaacaagaagatctcctctattgcagcagcaaaattcttactctgtgccagatgatgtacccaatagcgacaggaatattgtagctctggtggtaaatgctgatggatagacatggcatcgatctcagttctttgtattccatagcccttcaggttgcaaatattcttctttaagcgaccacgcatggtgataagacagcgcatggcgatatccatatgtttcttgggctcgtccacaaggaatctgctctgggatcggaccaagaaatttcggaaggacaaatgtaaaatcctaacaggcagatctcgtttcttcggaacgcttagaacagattgaaataaatccaatcgattgctgattaggtctggctcaagcccaagaaatagggagagcgcattgattgaaagtggaacagcgagaagaatgatgacaccgactatttcctggaactcttgcaagagctgctgctgttctgactcattattgtcttggtcatctatcagttgcgtcagaattggcaggtacgtcttgtccattttagcggcatatttagcttggtcctttaaaagctctgtgaggcgtgatgcaggttcccattttagattctcgatgtatcggcacacggtggcggcacaaatgaacagtggaactgacatcttaactaattgttggatgatgtcatcgcccggccagtctcgacacatatttctatcgtgtctgatcttcgcaaatctgtccttcaggaatagatatatatcgtgttctgtcgcttttctggagatatcatgaagaaccaggtcctggtaatcatggttcgtgatctctaaaaagccgaggcgaatcgacagttcaggtcggcttgtcaagaatacacgaaggcgaatcgcgggtgccttttgtagaagaggcaataatctgattatggttcgtacatcttgatcatgttcacattcgtccaaggcatcgatcactatcacagcggtatgaggagattgctcatcgagttgcttaaggtcaagcaatggttgaaggagtattttatcaaactgctctcttagcgattttgaagcaatgtctgggtcgccatggagtgccttctgcagaccagcacttagcccagagaaatttagcactagttgccttgcgagtgttgggagaagttttgtggcatttcctcgatcaccttcaccccttttgaagaaaaagcttgctcctaggtgtttggtctccttgagcgattttgccacagttcgagatatcgtggatttcccagttccagccattccatttaaccaaaagaggcactttgtgttgggtgaaaaggcccattcttttatctgttgaagaagttcggtcctcgtgccttgcagacactcatcttcatgttgatctgggtatgagttgtattcggccccacgcgcaaagggtaacttgtcaagaaccatcttctgattggcatgctcaccatgctgaatcattcctgtgatgagcgttctagatatcgtttaatcaaatatcctcaagcaagagcatgttatccgcaaaaacatacgtctgatcaagctgcaacgacaagttaaaggacgacttgtatctttcaagattctgaacaatagcctccatctctgtgtgtttcaagggccacttcaaggctcgaagtcccatttttctcatcagcgtctttcccctccctggatcaagtttcgcttctaaggctcggaggtcggagaggcaatcggtaatattactgactagacgcgaagaagcaggtagggtgttgctgtggctttgaagtaatttatcgaggtcttgcagaattccttggacgcccgaaatcgccctttgtaatttattaatctcgtctcgtgcattgtttacctcctggatgtagcccccgcaaatcttcaccaggcttcccgtcagttgaatgaccgcgacaacgctcgctgccgatgaaagtaaatccatatggaagaacgggcggcataaatgcttaatttcatgtaagtagggaaacagatcactatagcgtgggattgtgttcggtttggtagtttgggctttccggcgagaggtaaaagaggggtaggttaggcggcgggagcgaggctgtgatccagggtgcagtttcgagtgctaagttgaccgaccaatcacgaattcagccgttgacgcactccaaaaggccacattgggataacccgttcttatttctagtggatactggctggctgttggctcaaatgtcggcccgaaccgaaccgaaccaaacccgtctcgccagacccatctccgttgcgatgcgcctctggccacctcatcaacttttcggtcgaccgcgcgacatattatggcgccccaacttgcacccccgccatcccgtcgaggtacaaggtgggcttttcgagcaggtgatcgcacaacgcctcaagcatgactggagtgatgctacgttgtcgtccacctttattaagcggtgctttgacgctgccaaacatccgtatattggaagagattctcaggatggtactcttatttgcagccagcagcctgcgccatctgcggtatggacagctccccaccgtgtatcatgtcataaataagatcttgctttgagggagctaggtttggggtcatcttgattcaaccactggtgattgatcgttaagataccctccgtcgggtggttattttgaaggtgggtgagacgtattgattcacacgcaaatacatacttgaaagtagtaacctacgtaagaagcaatacacgcccaactgacaggggtactccggaaaaattcccaaacagagactagcgggtcttggcattgtgattcgagaaacaacgaaagagtgtagcggtggcaccagtttcgggacgcactgtatgccgtcaaaaattactaacggacatctgagatgacatatattgcaaggctttatgtatgggctctgaggagacacagtactatatatattatgacatgtatagtagatcagagatagttgccctttcggcttagccgccgggcgttaataaataaattgtgtgtgtgtatgccgtcaatctaacatcgtttaatcgtgtaataaatggccaggaatgacgatgagtgcaactccaagcaccatcgtttcttgtaatcgtcattatcaacgatataaccctgtcaatgctctgcgcctagtcgtcatccaagtgtataaattccataaataaattgtctgcggaggttatatccgaatctttaaaactggttggcagagtgttggtgagaaaataatcctctaaactcggcaatgtttcattacttaaattcctaaaagtagttcctgcaggctctgactgaagctgccactttctttttcgtttaatacaatttgactggggctcttctatggaatgtatatcaaagaagtgccactggagatataagttattaatatacttcctttcttcgcaatatagatgagggcagaagactgtggctaaagagaccgctgaccctaagtgtttatcaatgtgattcagaagagttgattttgcaacctattgttaaaatctcttgtctggtttcttacttttatcgcctaggtagaatggacagaatcctagcgtaataagtgtggagcggaaagtcaaaagaccacattgggggttgaggttgtcgagatagtatttgtaatgattctcctaggaatcttcgttaaggaagagtttagtgtaaagataacaaaattaaacaaagctgtgctgtacgtgtcgataggcgcgcttttcgttcttatagcgctgctagtattatataccatttaaggattttcttcgatactgtagtatatgcttggctctcccttgtagtggaatgctgtcttcttgttaactttttgatctataatactcttcgggtatacttactctagtatagacttattgtatattggataacggccttccttaggggctatgccggggtagtaaatggcacgttctgtcgatatacaaatagtaactatatcttctaggcactgtcgactaagtttactatctagagttgccttctttaataaattcttgctgagacgggagcgctctggtagatatttcttatagatattgaaaagaggcgttagattgcgttcggagaagttgttcccagacacgtactcagtgtatgaagtatcctaccagcttttgataaagtctttcttctaggtgagcaatctctttgctttcttattatagagacgatcctgtttaaatataaggtccctattctcttctagtcttctagcaatctcctgcgttaagtgggtaattctctggttaatcttaataatttcatcgttagattcgaattgtgcggtcgtagctgtattaagttttagcggcacattcgagtctcggtgataagacatgctttgttccatatcgcggcatttgtagttagggtctaaattatagaataaggcttgtatatctaatgccttaagagaagactgatattttagataggtgttatgattctaatgattaagagcctggctataagtagcctgagaagccttggctaaaattccttagtaaaattgaggtgtaacggcataaatatacttacagttgatcttatttgcaatacctcctcgaattccatgtatatataactggtctttaaacctatcccgctgggccaaggtagtgaagttgtgctgtaatgaggagaaggttaacgccttcgttaggtcgggtccttaagcagtgacccttctgaagaatggtaaatcctttgtggtttcattctattctaaggtctatgactctcttctgttaggtggctttgcagtaagaaccttggtcacagtggtaagtcctttaaaggtaccatccgctatcctatagacgattacctagaaaataaaactcatcctaagcaccggatgctccctgaaccaattttttggtctaattttattatattagctatttctggatagaatgattatagctcgtaaactcacaaggtagtatcgtcgcgataacgccagcctttcaagaatttgggatcaattattacctaacgtatcagagaccccctttccttactctatttgagatgaaatgaaaggtgctgataattatcagttagatttgatataattaggaagcgtaatcgtcaagatataaaccctataatataagcatttatttgatttgcgataagtacttgatttaacgatagcccctgctcttgtacctgagctagcaaataaagagagagaacttgcggtctgtacgcgtgctctctcatgtatataattgtgacagttatttataaataggtgtcgaagtaggtaagctatgtcctttccgttgactaggaaccgctctctgggctttgtagggagcttatattccactatgagttcggttctaatatacttttgtttttgttagtagcgagctcctaaaaggataattgttacctcttatattaagaatgttgtccttaacttccttgggaagggatcgagaagtttctcgctcccacttcgatgtaaagctggtgaagtgattataagctgactgctaagacggaacctttttatacgatttgatataaaactctacgaaaagtttcaaaagttcaggagtcggaacaggcaggttaggaaaattcgggtctgtggactcgttacgggaaatcctccatctactaataattaggaaccaaaatcggcgaaatccgagcgaagcttacagtgcctaattgtcaactgtacggttatatttttctagcgtagcaggcgctagctcagggtggcacacagtattaccctctttttccttctcgtcttgatagtcacgtgtgaagccatgtgatatcgcacgtgcgagacgctcctggagtgctttcgggatattcttttcggagaacatgttttagctggtaaagagattcaaagaaaatcatggcagagtaagagaagcgcctcggggcttgactatttgtatttgtcttagggctaacatagatttggagtgagttggcccctatcacctcaagggtgagaattgtcaccccgttctcacctttctcacccagtctcaagtcttctcacccatatcacccgcactcaccctagagtgccgcttaggtgctgagggcacattgagtattggccgtgcagaatatgtggcttaagtacggctgagcggacgggaagccctgttttccacaccctatggtcgtatgtatcagatcgtgtttcgaggaggtttatagcgtactattgcaagggttggatgtgaggatgctaacaacaccacaatgcttgtcgctaattggagatccaatcagagtggtcgaggtcttgggcaatatggtattggtcgattaaaccggaaaattcatgcacgttgggcgatcctctgcagttcaaaatgagaaatcctcgagatactcgctagttggtacaacataattgtctgcgcgtcggcatataacagttacatatctcactcacacgatgaccacaatcctctttgttcctggtgcttggaccgctcggacgttctacgaaccatttctccaagctctcacggtcgctggctacgatgtccactacgcggggtacccctctgtagactcctcggacccgttggtcactgattgccaagccgacaccgatgctattacgactattctccagtctctcgtggaggatcagggcaaagatgttgtgctctttttgtattcctatggcggcatgcctggatccgccgcggctaccgggctagccaaagcgcagcgggctcaagagggcaaagcaggtggtgtgattggactgctgttcctgggcgctttcatcgtacccgagggtattagttgtgccggtgcccagggtggaatcctgcccccctgggtcttacacgatcaggtaagaggacctcctcgtccccactatagttatataatgcattttgctgacatgttgcagccctccgcgaatcttgctgtcgtggataaccccattaaaatcttcgctgccgatgttgatgcggtcttcgcccagtccctgaccgcaggactcagaccgcatgcgaccttagctttcaattcgccccagccccatccggcctgggcggacgaagcgttccgagggcgtttggcgttcatcgtcaccactgaggattgtgcggtgccaagggaggcgcaattcggcatgatggcctccacgcagcaggcgtggattgtcagggaagtggtgtccagtcattgcgcgccattcctgaatcggatcaacgagacggtggaacttactcgggagatcattggccaattcctataaagggaaacatactttcacttggggttaggttgctatgggcttttcgtgcaggtcaccaggctccgacaccaaatccaacaaccatgcaaactttgttgaattgcccgtctatatataccaagaaataaccgcttcacggtggacatatttccatagaaagggacattagaaataccttgagtagaaaatactgtcttcagttatcccgagttacgactacagtacgaagagagacatttaattccaaaccgtctgtacaatttatttcgtatcttcgtgcacctctaggtaatattcatttgcgaccgagactcatttctgagatgcctcttccatagccctcaaaaagcaagccttatcaataggccgcccattcttctggcttcctttccacgctcgtcgctggttgaccttccaagcagagtcactcttgtgtgcctcctttttcttttcatcaccgaggtctagcttcataatcaacagacgcaacgcccaattctctataccaccagctttctgttcggtctccataagcaggcgtagcagttcgatgtgcaattttctcaacacggccttcgtttgagagaatgccccccgagcagtgatctcctccagtatgtactgtttcatctcaggtgacagggtttctcccttttgggatcccttaaacacgcttgacaacgctgtgttggagaatcctggcgactgcattgataagatgattgggaaagatagcttcccttcgtcgagatcatcacagaagcccttgttttttgtgtactaaagcaacatgttagttaggatttgtgtttagaaacacagtgtggggatttgttacatcgtcgctttgaaggttctggtagtcatctcggatctggaaatgtcttccaagcaacgtcgcaaactgacttatatcaaggtccctaggatatattagcctgatcttattttcttgtgcgatgagcgttaaaatacctattcaccgtcgcctcggatctcatcagacgactaataagacggaataaaccaccagtctctgtgtaatggtcagtaaattggtgtataaagatggatgcgccaatacgtactgccgtcaaccatgctgatatactgcgcaggggtcggcacatgcgtatggtagctccagtggagatcgcgtccctgcccaagctgtaggttacgcatttcatctagcactgtcagttcgagaaatctcaagcaaatatgccgggataatctacctgtgtaaactaaaaccgcagacggggaaagcatctgtacgagatacaaggcttcgttcatgagatatgtcgcagtattgatggtttggccaacgccaaatatctgatgcgccactggccttccgcgtctgaggacacttccatcctggatgtcatcgagtctatttcgaggtcagtaaggaaaacaattgcaggttggaatgggcccggttacaataatgatgagttgtgtaggaagttaactgcaccctctatgatcaggagggacttcacgggcaccttgtaccatgagttcagagccgctatcattgtctgtctcacgttcttagaaggcagagagttgatgtaggtgtagggatttaacacgggctgtggatttctagttagcacttaggtctccttgtctccagcgactcttgcggatagaaacttacctcatcgattgtgggatacccagatgtgtacttggccaggacatcactctctgctgtgttgtctgaaatattgttagtctcgtttgccggattgaaaccaactgagatagcgtgttatactcacttgacttaggttcttggagttcaatctctttagtaccattaatctcttgttttgagtcacgaaggtgctcttcaggcgtgagaactcgcacagcctcgctgccaaacttctcaaggtggtctttatacggattccgttcaaccttgaagtaacgaggaacacacagactccaaacccagtttccagccattgaatgctcgagcagtttcagccagctgaggattgaatctgatggactagccgtcgccttgtactgttccttcaagtaacaaaatcgctcttcgtgggctcggatctccgcttggacaactgcctttgctgcgcagtgcgtcaggccttgtgtaactgcgacaatatgtaccgcattgactaatggcacctcgccattgcttttcacatgagcgtcgtattccttgtcccaagagaacaagtcatttaccaggcataattccgcatatgcgacgtagctcataggatcagcgattttttcttcctcgggggtgagtgtgatgcctgatccccatcggaaattataaagtgtccagcttggaataatcagattgagttctcaacttcggaatggggtgacatactctgctgctgcatcaacaattctgaactccaggtagtcatccagactgggaaattcaagactcctcacgtcctgtaccgaggcagtgaatgtttgccacgctttaaggaaaaattcgccgaacacgggatccaaacgcaggtactcggccgcaatcttggcctggacctcggatttgcgttgtgctttagctgaaaccctgttcgatacagaagtcatactgctctgattaatagcctggtgaagcattttgttttcgagcaacaactaaatcgcgcgtcagtttcttgatccgcatacatagaatgatttatcatacagcttcttgatcagcggcattatcggtttcatctaactcgatgttagttgcggcatatagagtgatttattcccacgtaccatcatgaaggaatgcatattccacagtgtaagcgacaagcgcaagtctttcgggtaggcagttaggcgcacacagtgaggtaaaattacccgcgtgtgcattgagattgccaaacttcgacccaacggcgtcaattccattgaggtctatgtggcattgtactgaaacatgatcggcaattatcgtttgtttgtgaatatatggggtaaagagagaggagtatgccggattattggcgtagatctcgggatcaatgctctccgcatacacgtcggctattgtttcgcccatgttcaatgttgctttgtgattcgagaaaataccgagctgcacgatgcacatgcaacagccgagggggcccgggtggtataaataatcgaattagaaaaagtaaaccacccttgctaagacaggtgcgctagtttagcccggcactataaacgtcctcttccgatgccggttcattcgtttctaccgtacgatatacgaagtacgcgcaagggaggctaccactttgcaccggacaagtcccacaataatcaacgtgtctagcagccaatgacaccaattggctccgccttgacacatacaacatgagtgagacaagaaccaactatgatctccactagaagtaaatctaaagcacgttttcatccgaggctcctatctcgatagaaactgagcaattgactcgcgcacaaattcgagtgacgatcatgtaccttttacgtctactcttgcctatttgagtgcgaatctaacttgttactatcaaggacagcacgccatgggggttatgccaagcgggatatccacagcgaaaggagcattgaaaatcataatctcggttgggggccgttacttttagtgcacttcgtgcaaacgggtcgcaccaataagaaacaagcacgttagtgcatcgtggagtcttttgctcgttatctgggctatttacaaccggcaggatcggagggacctttgcgaaacggccgacgccatgagccacgccttggccggcgcttgtacgctctaatttggcgagttacatggcgggaaatgtggagatggtggagatgagagtcgggaagattgaaagattcccttagtagcccagatggagtatggagcagtaaaaagtacatctgcgtctagacaagatcttcctcagggtttcctatctgagctgtcgctgcttttacgagttcccgaggtagaggagatgtcagcacgaggggtcagtcacgtgggaatgagatgcttagtgatttagactataccaagaagggattagcgtctagatatcgatttacggaggacggagtactccgtacaaaggtcatcattctgttcgatatagacaagtcaaaaggccagttcatgattcgatgaattatcaatagtaatcaaatcttcgccgagcgggagaccgacgtggattcgcccaaaaagatcaatcgatcaatggcagactcgtgctgccaagaggacttcaaggcatctttagtacctgcaagtgcttgtgagcgcacccacctagatgctatctgtgtcgcacgctcatcgccatcggatgatgcatcgtaaaggaccaaacatgaggacactatggcagcaatatgttgcaggatctccctgtcgcgccacaggagttcgtccctgttagtactctgtgtaatttcgagcagagcgtttagtcttccttccacagtaacgcattcctcggcgaaccccgattggcagcccttcaaaatatcctttgtccattcaaccaaaactgagcctgccgacttcttaccctgcaagcgtttgtcggtaagaactcgaataacatcctccgccataacactgactgtgccctcccagatggcattgacagtggtatctcggaaaatcttggcgatgttcagaataccgccatcttcattattttcgcagtacccaaccccgcccaggcattccatgcaggcccgaagtccatgaaccgcgttcacactaacagtggccttcaatgcgggtgttatcagacgcaggagagtggcagccttgacaggatcctgcgggataagtccagcagctttggtactgctgaccatggagtcccaattctgctccatggtaccctgcagtgcgaccccgaagaatgccaaatgcattgccgcagagtaattgactgtctcgtccgccatccaccgcacgtgctgcacattatcctgcaaaagcgctccacgcgtcttgcggacacgagtgtacgcccggcaaatggatagtccgcggccccaaccagctgctgatacacctgcgcagtagagtcgggtgatgttaagaacggtcgagatggcattgactcccctaccttcctctcccaccagccaaccacggacccccttcaattccaactccgctgtgggtagggacttggtgcccagcttgctcttcaaacgctggatacgaatgccgttcagctcgctcgcgtcactgttctttccggagcggcgccgcatgggtgcaaggaagaggctgagacccttctcggtctgcgcaagcagcatggccatgtcggagtcagtggcgctgctgaaccacttgaatccgtcgatgcgccacgggcccaactgcaacccatgagcatccacatctcgtccctgttcggcatctcgtgagatctcttctgccgtcaaccgccacgccagcgtctccgtttcccgaacatcactgccgcccgttctctccgtcatccattgtcctgttgtccaggcctcacagggaatatctgatacaagacgtctgtatgcttcttgcaagaccgcgcggcggccgggctgatcaccgtccacgtcgtccagccgtgccgccaacaatttagccgctccgtccgtcatcgagccaggacaccccgtcatcgcagcactgggtgaccagacatggttcattgcgaactgttgcacgcgtcgattccattgttcattgctcttcttgtaggcgactgcaaccaagccctcctcttgtgcgatggctgtcagctttctccacccttctccggtgattaacgggtcgacacgattctggatgccgaaggtactaagtggtcggatgatgggctgattcacctcggcatcggtggccaagttcaggatagccggatccagtgcacgacgcgataggttgtggactgagacgccaacaggggattcccgcggcaggtagagattgagaattctcgcaagggctatatcatccgaagcggccagggagcttgagtttgctgacccatcgttgacgaaggtatatgctggaggaaccgtggggatggactgaaagaagccatccgtagacgatgaaggttttctgccggtcgagtgtaccatcatgcttgttcaatttgtatttgcggggaaataaagttggggtatcggtttacggcttgggtgcacgctatataagcaccggatagcgtccatcagtaccgaggttccccatgtgggactcgtttttgatatcctagttccaccggatatctgacttccaccggatgtaccttgaatcctattggtgagcgaggagctctgtccccacaacttgagtataccatatctattccaccggatataacccagctggcaattccagagtcagttccacgtagaacataaagtaaatcattgtcttcatatgcatgtgcaagatatttacttccaattcctcaattcgcaaccatgtcttcttgcactatctacaaccctgtgaaggactatactatacccaatacagacctactgtccctcgtctttggtgagaattctacattaatcgagacatacagtctctaattatgaatagaccaccccgacgtactagcaaaagatgataccatcctccatgtggaaggtgcagacagcagcaacagtatcaccaagtcacaatgccgcgagtacaccatgcgaatcgcccacattctgcgcgagaagtttgcgattggcgcccaaggtccagggatcgataccgtttgttgcatctcgaccggacaagttcttctcccctcgcttttctacggcgtgattgccgcgggcggggtgtacagtgcggctagctcgagcttcacggccggagagctggcacgacaggtgaaacacggagaatctcgactcattgttactagcaaggactgcatcaaagtttccttcaaagctgccgctgaatgtggaatcccactggatagggtgttggttctagatagttcacgtggacagagaagtcttcgagatggacacgggaaggaactgctccatgagtccaccggacagctggcttgggaggtgatttctgatcaacagatcctgcatgatagggccgcctgtctgatttacagcagcggaacaactggcgagcctaagggttagttgcgtcgctccttttgtggttcataactaatcaagacccaggcgttgaaattacacatgagaatctggtgtccgctgccgtcgtgaacctctacgcctaccgcgattacatatccagacaaaaagctcaaaccccagacttcacaccagaataccggacagtcgcacacctcccggcagcgcacatcgccggctgccagggctatttcctgcaaccggtgctatgcggcggaacagtgtactggatgtccaagtttgagccgaaaagctttctctggaactgtgcgacatatcgtcccacgttcctctttaccgtcccaccaatctaccagttactggtacaaagcccattggtgaatgatcaatttaagcatatgatccatgcggtatctggtgcggcgcccatgggaccggatttggtcgtgcgagcaaccaagacactgggatgtcccgtttcacaaacttggggtcttagtgagacaactggtagtgtcaccatctctccctgggacgaattcgagtctgatggaagtctctcgcctctgcttccgaatattcggctgcgcatcgttgacgaggccgagaatgatgtcgaagacggacaggagggagagttcatcgtccaaggtccaatggttacaaaggggtattggaaaaacgaagaagccacgcgagcgagcttcacagccgatggagcatggttcaagaccggcgacttgggattgcgacgaaatgggaggatcttcatcatcgaccggaagaaggtgagcgactatacctcaagcattgaagtaatttctgacagtttcggttgcacttcaggagatgatcaagtataagggtcttcaagtcgcaccagcagagttggaaggtcttttgctatcgcattcattaattcaggatgtcgctgtcattggagttccggatgtcaacatggcgggaaatgagcttccccgtgcgtatgtggtggctaatcagagcaaaatcacggaagatgccatcaaaagcttcattaaagataatcttgcctcgcataagcaattgaggggtggtgttatcttcgtacctgagattcccaagagcccgactggcaaaatccttcgaaaggagctgcgagctgctgcgatgggagccaaggcgaagctatgaagcggagccgaggttgtatatcacgtgacctcaaatcaatagacaattcctgtctactttcagacaaccgtcagtaaatattgtactcaatagcaaatagagttgaatataacaccgtcaatcatacataccttttaccagtacgaggagtagatccttggcatcctatgacataaacatttgacttccgagctccaccggatgtcagatccctcccaatatccaacccttgtattccgctgttatggcgccctccagggtccgatctgcctgtgcaagatgccgacggcaaaaactcaaggtcttcctttcttgtcatacatcacggattctacttactctttacagtgtgatgatacccgaccctgccagctgtgcattcgctccgatgcagaatgtacggatgttataaacaagcgacgaaggtgagtaggacgcaccatagcataatatatattctaataattatagaaaaaataccagagctcagtcacaaagcagaaagccgcctgagaatcgtccactgctcacggaaacggccccttcgcacgatcccagccccggtctacagacgcatgttgggcccggtggcaatcatgctacagatctggtcaccagccagcgagagcgagcccactcaacctttcatcatgcccaggaggtaagattatgtactgtcaagcttttcttctgctgctctaaccccatcagctttttcgcaatcatatgaccaccttgcgggactctgatgccattcctgacggggcccccgcaaacaagctgcctcaagttcaaggatcgagaataccaattttcgacataattgggatgcagctcccgtcgacacccgttactctggcattattagacgcatatctccaagcgaatcactggtacctttccatgtttcatgagcccagctttcgcgcacgtctggtcaccatccttcggactgagggtattctcccctgtgagaagtcatttttattgttattgctagctgtcttaattcttggagcccggttttctaatcacgataccctacattccctggactcacagtttaatcttcagcagtgcaaggcaacgtggatcaaggctgtggaggatcatatattctggattctaaaagaagccacgctagaatcaatcgcctgtgccgttctcatgtccattgagtaccttttagaacgcaagacgcagctctcctttaccatgtcaggactgggatcgcgagcggcgcaggcgatgagccttcatgacgaggccacgtgggaaccactagatttcattgaaatacaggtgcgccgacgagtttggtggtccatctacatggtcgatgtgtgagttgagcaactatttgtacacatacgaagcaacctaacacgttccagatatatcgcacaagcgtacgggaaaccatcagtcctcccaaccgtacagttcaacgtttgcgagccaaaagatctagatgatacgatggccacctgcccggggatcggatcatacgaggtacgagaagacggcacgttcaagcctgtgacgatattctcgtacaaccgctacaaagcacagctgtactcgattgccgatccaacggcgcatagtatacgtttacctcatatcaagcgcacctatgcccgtctcctggattgggaaaagaccgtcccacgagagctcaagcttggcagcttttcggaggatcagagcatgatcgatgaccctgctcggcgtgttttttccctgcaggcactaacgctacaggtgtcttatgactacaaacacctgatattgtttcgccctttccttctcagtaggaaatacctcagtgtccgattacacgatggcccgatcgaatcgcaagatagatccgataccacgatccgtgaccaattattcacttctgccttgcgcatgtcgagcatctgtcggtggcaaaatattttatctattcttgggaacaccacctctgccgttcaactctgtttccagtgcttcacagcgggtgtggtactggcgatgctggccttatctgaactgtcctccccacgactgtctgaatgcaagcaaggactggcccgtctcattaaatctctggaagtggcaggttcgggcagtcctttatcccgacaaagtgtcgatatcctgatggaagccatgcatcttatctcggccgaggaagtcaaggagctagtctccagggcgggcaaaccagcggaagatctacgcgatgttgtatcagactcagtcacatggtcggcggacagctgcggggcgagtgatgcgcagcatgcaatgcagccagatgcagtgcatgggccaggcatatgggcggagttggacttgacgccggatgaaagcgagccggaaatactcaactccatctctctataccaatcgcttgcgtctttgttctagccaatacctgtcatataacggtaatagcatggaatgcaggcctgtgtacaacactcatcacggacagcggacttcaacgatctctacatttttagtgcggtgggtcctaccgcgaggctacatctgggcatttgcatattgatgtgtaccttgttaatttatgatatctacataacgggcaacgttcaactgtttccgaggttgaaaggcctaccaattccaagacgatctagccctggacccgtgtgtgattacgtcagccggtgcgtgctcagttctacccgctgacaaaaagcggcaagagatgagcctaaaatggaaaacggaaggttttcttaggagggcccaaaacatgcacaacctgccttagtgtatgcatctcgacgagtttgtatagaacaaaacttgtcgaattattatcgtcggcccgatgccaatccgatacgattgtgtagtatcccattggtctacgtggtcaccctcgatactaactaaacatgcccaggagcctcacaagcattttccgaatctgaattgaagctcctacaagagttgtacgctgcgatatgcaatgttccggctgtttcagagatatattaatatttttcacatggaatcctcacggcagacccctgtcaccacggatacccacatcgcggtcgcgcaagccgttcgaatccttgcacaaaagtagcgccggggcacattggcttgggatccgaacaaaattacaattctgtggctaaacttccagtggggattcggaagtatgccacgtagcaatcgttagctcttctacggagtgctccgtactcggcatccaatcccagctagagcaattggtcaacattctcaattcggatttatacaatcataatcccttgtggtaggtgaattgtctctcaaactttagccgctcaattttcagcatcgagcacatcatcgccatgctattactgtggtttggcttcttttccttcatttttggggtggtgatctatcgactatatttccatcctctcagcaagttcccggggccgaaactagctgccctaacaagtctttatgaattttattacaatgtggtcctgggtggccggtatttgtgggagatagagagaatgcatgagaaatatggtaagaacattattcgagacactggatcatatgtcaatactaaacattttcgaggtcctattgtgcgcattactccccacgagcttcatgtggcagatccaaacttctatacggaaatctatgcaggccctaccaggaggcgggacaaagacccaagacttgtgcgactggcaggccaaccaacttccatgttcgcgactgttgatcatggcctgcacagttcgcgtcgagctatcctgaacagctatttctccaaaaagtcaatcgcaggcttagaagacatgatccagggcaaggtgcaaaagcttgtcaagcggctgagcatggcctgtgatcaaggcacagttgtaaagctggatgctgcgtcttcggctctgactgcggatattatctcggagtacgcgcatggtgtgagtcttgactacttggacgatgtcaatttcaataatgaagttgcggactccatattaagtcttgcgtctgtagttcatgtgttgaagttcttccctttccttttggatctttcaaagttcatccctgataaggtgcttgagaagctttggttccatgcagccaacattttgcgactacagaaactggttcgtgctcaagccgacgtcgcactccaaaatggaggtaaagtggatggtcaagcaacaatgttcggtgctctctgtgacccatccttgcctgtgcaggaaagaacattggatcggttgcaggacgaaggcttttcgttgattggtggaggcacggagactacaacaggaacattgaagattgtcatgttccacttgctcaatgagaaggcattacttctcaagctccgcgaggagctcgagcaatacccatctagcacatgggccgaccttgaaaaactgccctacatggtgagcaatgcaatatggtatgccaaggcgagactaatcaatgaaatttgttcagagaggaacgataaatgagggacttcggctctccggcgtcataactcgccttccccggcgtgcacccgatgaagccttggtatacaagcaatggacaattccaccaaacgtaagctcatatattctccgagatgaacaacactaacgcgcctcaaagtccctgatgagcacatcgtctcattttgttcacacaaattcggacctgttccctaatccgcttgcctttgaccctgagcgctggatccgggctgaagcggccggccaacgcctggagcatatgattgtcaccttcagcaagggctctaggcaatgcatgggtaaccagtaagataaactcacttcctcctggattctcaaacttaccagtgatctagtttggctttggcagagttgtacctggtcatttccacgctggtgcggagattcgatatggatctatatggggtgacggcagataacatcgtcacgcatcgggagtatggctttggcgttccaaaagaaagaggtgaaggattaagagttagtattacacgggttcgtgacccgtagtttgtatcgtttgacatatactctttcgtatatatatcgagagtgggcttatacgcgatcatgttaacactgggcacggctcaaaaaatgatattttatacaaatttcacgaccctgcacaaaagagaaaccaaagcaacaaccaagctataatcgcacatggtcagcacataaatctcaaagtaaccggacacatccactaagccacattctactcattttttatcaattctaggaccatcttcagactatttatacattgattgcattcgcttaaagcaaacacactcacactcgaacccacgaggctagcatcaatattcactaccataccactaatctatcaaaccgcaggcatggcaggacacagggcgtctgacgagttccgcgaggaacatgctaatttctggaccctcatgcagcaaattattcatggccttagaaacaactacccatcaaaccaggacaaagtcattggctggatgggccaactcaatctccaactctcgacccttcgacgagccggagagatgatggggttgagttatccacctagcgacgtcgtcctcgatgctccacctcagtacttcactgcccgcgctcagcgccatcaaaattacttcggtaccaactttgggtactcctgctggtatacccaaggccagctaggctacgccattgcagaccttctccaccagcgagatcacacccgtgtagccgaccagttggagcagttgctggtgagttggcaattgaccgagatgagagcatttcctcgccatctcactactcacaatcatgtcgagcacccggccgatatcgtgcatattgatgttccaccatactatacaccaggcgctgggcgcagcaagacagagactgggccagtccgtgtccatattactatgcctgctccaaccgatactatttacggcgtggcacagcagactcgccatcgccctgcaccataccttgaacgaggtgctcgcccgagacatcgtgggaatgctaggctaatcccgccgatgcctaagatggacctccaactcccgaatatcatgcataatagcgatattcgccatgctccactgccgactcttcctgctgttcgttcctttttcactccatacagcattcccggacatgctctgttcggtataccaaatatgtctgtgccacccctacgtggtatgcagtacccgtctattgtgccagccccggatactggtgattcattgtctgttttgaatgcccatgtcggggagactttgaataaacacctgttctgtcgggatggcgttcgctgttgagatagtgggcaatctagctcgtttgagctttttaattggaccctgggtcaccacaatgcatgctttggtattgactaccactgagtttaagaactccggttgacttgtggttattgctaacgctgattttgattggtaggttcttatactcccttgtgctttgatcgactatggattgcgccctctcttttggaaaaaaataaaatgataatggcctgtatggaatcagaacgctttatacacacaagaaattgatgcctggaagagctagtcgccatagtcctccggggatgttcctgaataaatttcgggttatgtacttccaaagttaggagccttgagcgcaatagaatttatagcaggtattcactaaatatggatcttagtcggttaaattaaataactagagatagctttgcaacttctaccaatacgagcatattttcggtgtgaagtacaagatcgatgagcaataaacaggggttattaggctgttcagcgaatacggctttattcctgctcgtattcacatactccgtatatctgtgtagtatcgatctaaatagtaagtgacttccttggtataaagacaaggaaccttgtgcgccgtttcggttatggttagatcggtggattcctcaaccgggatctgaatggcttgtatattcttattcagacaatttgtgaatctctcaataacaaccttggtagtatacttgtctagtcaaaagtaaacagttggttaatatatgtttgtaaagtggtatgttggccagaaggattgcacctcctatacgaggtacatgtatataaccttgcaatatactatacaacatactatacatggcaccacatcagtccatcgccttccatcttgccactttccaaatgtgttgaacctcaacaagccagccaatcaggggccaggatcagtcaggccattatcatttcttggcggccgatctccgcggatattatttggaggccagcttgtccacttcagtcagcagacactgacattcttgattcttctattcttttctaatattattgagattcttttttctcttttcaagctatcactgcgtagacttcacggcttacctccaacgacagaccctcgcgttgattctctggcctttgcgccaccttgcatatacaacaaccggacgactacgtgcttgatcatacaccacagtcggagaccaagatgcggtctgcagcgaggctgctctatgcagcagtgtttgcgcttgctagcttgagccatgccgccgttcataatcctgcattggacccaactaagtgtgctgtaagtcttatcaggaccgaggataccaacacagatgactgacagtacctagatcgaaccttcggccatggtatccgatgcgtgtgtcacatacggcgagatcaacggcatgaatgacctgattttcacgacgctcaactccctcacacaagaaacggactttttctcctactatcgcctcaacctgttcaatagacaatgtcccttctggaacgacgccaatagcatgtgtggcaacattgcctgtgccgtgaacactatcgactcagaggaggatattccgctgacgtggcgcgcggaagaactcagcaaactagagggcccgaaggcgaaccacccacctcgcaatattcaagccgagcggccgaaagaacgcccgctacagggagagctgggtgaagatgtcggcgagagctgtgtggtggaatatgatgacgaatgtgaggaacgagactactgtgtccccgaggacgagggttccgccgggaaaggagactatgtgagcttggtggataatccggagcggttcacgggatactctggagaaggtgcaaaccaagtgtgggatgccatctaccgcgaaaactgcttcttgaagcccgtggctgaggagctggaggagcagtcggtcaacgttccaataggcggcctccaggcagcctctgacttccgcgacgttctccaaaaggaatcgcagcgggtagaaagcctgtcgcttgataacgagtgcttggagaagcgagtcttccaccggctgctgagcggcatgcacgcttctatctcgacccatctgtgctgggactacctcaaccaaaccaccggcctgtggcaccccaacgtgcaatgcttcaaggatcgactccttgaccacccggagcgcatctcaaacatgtacttcaactacgcactagtctcgcgcgccgtggccaaactccgtaagcacctggacgggtacacatactgcgccagcgacccagtgcaagaccgtgagaccaaaaagcgcgtcaacaagctaacagcgaccttgacggagcttcctcaaatcttcgacgagaagatcatgttccaggacgccaacgccatcggcctgaaagaagacttccgcaaccgcttccgcaacgtcagtcgccttatggactgcgtcggctgcgacaagtgccgcctctggggcaagctccaggtaaacgggtacggaaccgcgctcaaggtgttgttcgagtacgacgaaaccaagaacggcgagaacccgcccctgcgccgcaccgagctggtcgctctcatcaacacactcggccgcatctcgcacagtatcgctgcttcgcgcagtatgcagcgcgctctgctgaccggcaccacccacatgttccccgtccacggcgccgtaccctcctctcaccacgccaacgccctcggcgacaacagacgcgtgttcagcgacggcaataacaacttctatttcgaaggtgaagataacgaagatgattatgtctacggccgaggcgccgcgccagaacggtacccctgggagcgcaaaccgcctggcccagacgatggctgggtcgaggatttcatgtccgagtggaatatgatctggggtacggttgggtatatctggcagtcttggttggacatcccatttacaatgtaagttgctcttgatctggttattggatagactgactgactcttgcagttaccaaatcggcacgtcggagttcatccgactgtacaattattggctcggattgccggtgcctcctcgcatgtggaagctgaagacgccgcagccgcgtgcacatactcaacctgctgcctatgctaatcgtgacgagttatgagttctgtatttcatctttgcattggcatttgtacatatggctctgtgctatggcgttgatagactttgtctgaatggttttgtttcagtacttgaatatatactccttaatgttcaggttattttgcctcgcttcgctcaacaaactattggagttatatgttcagtgtagttttgggtgttacaaagtacatattgaagctaaaatatagagacggatgtgaataagtctgctagtgtctagatatgtataagtatgactagacgacttatatctacttcaatccttcgctcatctccatctcaaacttcggtcgcccccaggtacatgcatttgccaccgaaaagatttcttccgtacaggcggaagagcgaaccgggcaggggacaggctgagcaaacaggatggacaagagaagtctgctagttaattagacatcgctgcttattacagagccaggcattagaggatcgtccttgtgaaaattatgaagaagatctacctaggcgttgtctagttgtaggtaataccccgtgttctcggcaaaccccgacctcggcatctccaccacatgcgtcttttcttccatcttctctcatcgctcaccccccagcctcgcggcgaatccatctgaacagacgtatatcgtatctcgatgctattccgctaatatccaactccatggcgacgccttcgccaccaaaaccgtgggagcgagccggtgcagctggtaagtgtcttctcgattgccgatatcctagcgccacagagtcagcgcaatccacagtgtccacaactaacttccttcctcaggaaacgcactatcaacagcacctatcgccggtagccctgctgcctcgaccgcgatgacttctacagccaaccccgcatcgtccaccgcccccgaacttccctcccgtccgagcgctctcaactccgtagttaacaactcgccatatggagcctcacgccttggaacaggcgcgtacggatccagctacggaggcatgggcgggatgggtggcatggcttcaccttactcccgcttcggctctatgggcactatgggctccatgtacggcggtggcggctacggaggctacggaggtggcatgtacgggggcatgggcggtatggggggaatgggagggatgggagggatgtacggtggcatgccgggacaagatcctaatgatccgaacagcctgacgaactcgttcgggcagagcacacaggccactttcgtcatgattgagagtattgttggtgcgtttggtggctttgcccagatgctcgagagcacgtacatggctacgcacagttcattctttggttagttccctggaagaaatacatgatacatggacactgctgacttttttagcaatggtctcggtcgcggaacaatttggaaacctgcgaaacacactcggctcggccctgggcattttcaccctcattcggtggttccgcacattgatcgctaagctcaccgggcgtcctccgccagctgatgcgacttccttgaccccggctgcttttgcggctttcctcggcggtcacgccgctgctacactcccccgcggcnnnnnnnnnnnnnnnnnnnnnnnnnnnnnnnnnnnnnnnnnnnnnnnnnnnnnnnnnnnnnnnnnnnnnnnnnnnnnnnnnnnnnnnnnnnnnnnnnnnnnnnnnnnnnnnnnnnnnnnnnnnnnnnnnnnnnnnnnnnnnnnnnnnnnnnnnnnnnnnnnnnnnnnnnnnnnnnnnnnnnnnnnnnnnnnnnnnnggcgggcacgccgctgctacactcccggatggctcaccggttcccgccaagccatccaagaagccattcttcatgtttttgattgccctctttggcctcccttacctcatgggcaagctcatcaagaccatggcccgatcccaggaggaagaggcgaaacgtcgccagctcgtgggtgttggggccgagggcccagcatcgctcgacccggccaagctggacttctgccgtctcctctacgactacacccccgagacccaggagagcaacggcattgacctggccgtgaagaagggtgacattgttgctgttctcagcaagtcggatcctatgggcaatgcctccgagtggtggcgctgccgtgctcgcgacggccgcgtcggatatctccccggcccgtacctggagactatccagcgccgacctactcagcaggctatcacaacaggcagcgagcctgctactcccactactacgatgaggggcgaccccgcaggccgcacacagagcctgtcgtcactgagcaagcccgagctcaacaccaagatgggcgatatcacgcctgagagcttccagaagagcacgttctactcatgagctatgctagacttgcttggctttctccttggtccttgtctttgaaatagacaagttggaacagtatatgattttttatagtgacgtgaaccggccaaaaactcccctttgagctttgctcatctttatatatcccctcgcgtgccttgatcttctcgatctcttatgaccagctgtgcaggtagcaccttgctctgcctggctcagtattctccccagcgcttcccctctttgtccatttgcttcctctccttctgtcggcttgaattcgtttagcgatctctcattggctttgtatttagtacttattagtgcatgcacacacatccacgcaacctctcccactagttctagttcgaaacaaaagcccctcttcctaacaaaagtacctatcctttcccatccaacatcccataatcctcctcgtggactatcgtctggcccacagtgggccatgccattcccgtcccgtcccggcacatatccgtatccgtccccaccgacatttgacatttgacattgacatttgacagtcgatacatcgaatatcattcttgactactcaatatgtatactgccgttgcaatagatacatcgtatatcattgtcgactacccaatatatacatatgtccaaggtacaacgtacaatgtatgtagtatgtacttctggagtaaggaaggtaaggggctgaaagtcgtgtccctttaccctgcgctgattgtgggacatttgtacggagtactttgtctaaatagtgggttttaccacccacatacctgccttggagaaatattgatgtgccgtgtcgtcattatggtactttctttcgtagttgatctacggagtaaaacgaggttaaacgcttagatgggtctcgttcatcaggtttcgtttcattgcgctatactttctacgattccttctgtccggttgtgtcacgtcgcgaagtatgtacgtttacgtggatgtgtatatgatcgccggtgatctgcgtgtcagggctatgtacttagccactatgtataatcgaatagaagtgtaggatgagtcaaacgtagtgtagtgtcgatcgatatgttatgcatgggaatcccagaaaatatatgaggcgtggagtacggagtacacagatgacagtgtccggatggagcgagtatgatggagcgaatgtgccggggttggtcggggtaataggcacagggcggggttgagtcgtaaaatgaaaatgaaaatgaaatgccgagcagattcagattcgggttgcagtatcttccagggttgtgtctgagaaaagaaatatcatgtcgggtgagacatgacgagactgactgggacagggacagggactgagccggggtgttcagtgtcagttgataagaacagggacaatatcggtcgagcggatggagtatcgttgtggagctgatgcccctttcgtgctacccatacttgagaagcaggacagatatgcgagatatgttggatacagaaaatcagatgccatgcatagaatagatcatcaatctagaacgcgaatacccatatccatatccatatccataataagaacgcccgtgctatgagtcttcctccgttggctaagtttggaagggagatgggggtcgggacggagcatgggaaccatatacatcgacaaaggccaaagagacaagaaaacgggctcacacgctgatgggaatggggaaatcaagaaaaaagaaaacaagatggagataatgaggcaaagagaaatgaaaagaaatgaaaagatctcaatcaaccaaaaccgaaccacaacaaaattaactaatcacatccccaatccctcatggtgaggaggctcgtggttagggtcatgatccctagcccacttcgacatcgactgcgtaagcgtaaagtccaaatcctgcaaccgcgtctggaacgactcgaccgtattccagtcaggcggatgagtatcagcttcaccaggcgcatcctcgagatcccgaggcgcaggaccaggacgagcatgcgggtgcgaggtgtgcgtgtgcgcattgtgcacgctgtgggatctgtgtccgctgtgcgcgctctgcccatgcgagctgtgtacagcatgagcggggagcgggctgtgcccatgggggctatgcacatggaccggatgcgggctgtgagcgccgtgcgagtgagaccctgccccgtgcgcgagatggttgcctattgactggtggtaggactggatctggcggggctggtttgggtgcatggacagcggcatggtcgggctttcttccagttccagatcggggaggctttcaaggtggtttgggtctagagcgagatatctgccatcaatatcatgcggtacactcacactcaccggaacggctgtggatttaccgtatgagccgagtgggtaggagggcatttctcgggttggggattgcatgtcggggggtgagatgggggttgtggcgctgtgttcgtctgttggctctggggtgtagcaggtcatgtcggagggggtttctatgggattattagtatgtatgtttggtttgataccgtctagttcatatccatgatgattcactcacgaggctcggggcttgactcggccttttggtccttgccgcggttggtatcccacgttgttccatagcgacgcacgaagcgggcgatgcgcttgggatcgacgttctggccgtttacgcggaaggccgtctgtttgccttgggcggcgcgcttctgttgcttgcgaagcatcagatggacttctttggctttgatgttctttcgaacgtgccatgcggccagacgatctttgtattgtttttctctagagcgagttagatctattcagacgaaggtagaagagaagggtgtattacgatgcaaagaacttataatctctctccataatccgtttcacatcgcgcagtttcaactggtcgttgcggtagagttgctcgatgatttcacgatattcatgccagtcatcggaccggcggggccgaaagacgtttggcgactgaggggagatgggggttgcgtaattattttccatggtgagggtgaggtataggtataggtaggtctagatgaagatgcgaggtcgggttataatataactggaatgcaaatcatgtaataaatgcaaaacaaaatagcccccgtccccctagaaatccgtaaaatccgtaaaatcccaatccgcaaatcgccaaacccccaaatggcccgaaagagcaaagaggaaagagatcaaagccaacgagttctctttggggcgacgtgcacgcggacgcacgatcccctggttccccgggccaatcacatcccagcacttcagacccacacccagctatgacccagctatgaccagccatgtccgcggccgcaacttgggggagaatatctccgggttttggtcttgatgaggtaggagtcttctttgttttgttgattgaattaatggatttgagaggtatttcaatttatttattccatgtatcgcgaattaatatcaaaccaggatgactcgatcacaccgttagctggagacctcgagtggagctgtactttggcctttacgcctaagcgaactattacatgcagtgcactggccgcaaatggatgcattttccgttgcctttttcgttttttcatttcttttacggagccctcggtatggagtacgcagataatacgccgccgagagtccccatctacccctattactgcggtataatacccaatacaaagattacctgcagatccaaaacaccgccgggagcgggccgaatcttccctgacaggtctttgtcttccccgagtctaaaatcctaaaatcccaggggcgtggatcaatcagccacagaatgggagtaatatcgtgtatagtatagtatactatactatagtaaaatacaataataatatatctcaatatgactataactacggagtataaggtgccaatctcaacggaggaaaccgttaaacccgttgacatccaccgcaagaggggaactcactgcgctttgggctctggacaaggttaccctgtccgaccaatctcccaacggtgctgtatatgtatgtatttataggctaaactgttaattataaaccttcgcggccgagactgttatgaaaaacgtacgatgcaaggtccgtgctactgccctttttatttatttattatgatatagtaaaatatgataatatattatttacggaatactccgtactccgtacttcctcccgacagaagtacagaactctgatctatagaatatagtttagatgctggatccctccgttgaacacgtagtacgagcttagcaggggtcactggtaattcaatcctacgctcatctacaacggtgcactgcacttgccccgctatcacctgcacgcgtggcccatatcccaagggctagaatcagcatctcccagggactagtgtcagctgggatcattctgggcgatgggtgctgcactgatctacagggtttcgtttctgggctttcggggagctggaatactagtccccgagagggatagggatgaaagggatctttgctttgagcttggattcttgaatacaacgtggctagttgggtacctcctgacaatccgattccataggggataggggagaacaatgaattgacgatacgccgcgaagcaaaaagaaaagaaaagaaatggaactcctcccgcattgggcctccaagctattcgctagcccccaaatggacatgatcgttcttaaagtgcggggtgtactttggtctctcctataaacaagataaacaatataaaggcatacaagatacatacaacatactaaactcagcacagattaaaaacaaccgcgctttcctgaggggaacacaacggccatcccgcgtggagcccctccactccgagccgcctgtatccggagatatctgccgcggccacgctcataggtccacggaccaccgttcaccggctcggatcgcatgcaggtactaggatgtacggcgcagactggaagggcactgcatgtcggacgcagctcgctcatccgcagacgagacggggaagggattgagaggagtgggggttctcttggcccacgcgctggtaacatcggtcagggggggattggttgggccgagtccagtagtttgtgacaggccaatgaaacggtggggacaggcgttggttgaaacacccagtggcacgtcatggccatcccctataatgtacatgcatagacaaagtacgagagtgatgcgctgggcagtctttaatttcatcctctgcgcgatttttgatttgatttcgatttcgatttcgatttcgatttgattttcgattttcgattttcggtttcccgcattgacatctgatccttgcttttggaaagtttcatgtgttcatggtttattcttggtctgtcgggcttgatccgcggctgcaacggctgcagccgcgacggctgctgagttggaccccgtgctagccagattgctggcatgcgcaaggaggaacttgcagcaagtcagcgtgtacttgcaggctcgagtccacgtctcgtcattctggttgaagcccaacttgatgctggcatctccaatccgatcccgcttgatctcatagggcagctttaatcccggtgcggtggcgccggtctggccgcgccggggagatacaaccggtgcaggggtcttttccacaaacttccccagctgccgcagacactcaaggaacgccaccatgcccgagtcaaagcgacggtgaagccaaggaaggttgagcgggagatcgcccgacgagaacaggtctaattgggtcaccttgggtgcagcgccctcgaccggctggccggctggctgcgtgggatattcaatcttgtcaatccgcgagttggaccccagcggcttgagccgatacccctgaaattggaaccccagcttctcggccatcgtggccagaaggagggcggtttgtccccatgcagcgttgatttcaggccagtcaaccgaaggattggccagccggcccagccgtagtccattgatagtaccgaaatatccatcatgaccaatgcagaacgcgtcattgtagacattcgtccgttgcagtcgctccagctgctgggagtcatgatcataccgcatattgagcgcatcccgttcgttttgaaactcggttagcgtcaacgcaaacgcattgcgcgaccgccagaagctctcctcgtccgcatccaggcggcgcgattcgatttccaagctggcaatctcggcatctagagcagccttttctttctcaaaggcctgcagctcagcgaaggcggctcgttccgcgtcgaggctttcattcaatgatttctgtgccgcctgcacctcctcctcggtcgggatcgacgcgttcaggttcctgagaaaggagatgtaggcgtctcgctccttcgtagaccccgccaagcgtttttgtaatccttccacaagcagctcggtgcattccacgcaaataggatggtcgatatcggagcgcgccgagacgatctcaaacagccgtgtcgttttctccacctgatcaacgagcggcccatcctggtcatgcagctgggcctgtgtatttcgcttgcttccactctcactgaccggtggtggcgcaacttgggactccgtgagcatcacgaatgacatattgccgctatccgcccggggtactgggttgggctggcctgcccgcggcgcagggatagaccgtctgtaaaccggcgacgtagcatgtttagaggactgatcgtacttatcgcggcgttcgtgcggatatgacgatcgcgctgacgaggagacagctccggtatccgacaacgtcttgcctgtagagtctagaccgattagcgggatcaacgatcgcctgtgggatgaacttactagatagcaagtcaaaggcagctgggttgagtgactctaccgagccatccagcttcaacggcgtgcgacacttctggcaatacatggtggttgttgttcatttcggtgtggggagtgaagtcgggggagctcaaggagcttcggcgaacgtcatttgttcctttgcatatttgctcgcgcttgcgcctgcacaccacattctactctactatcaacagatgccaatttgattatgtgttattttactacgcgttcaatgttcgatcacttctaatgcatctatcgatccttctccgaccatgaacccggacagcatggacgaccactccatgcaggacgatatggaacgaccagcgaagagaccatgtttatcatataccccaaccgaggacgacgaggttcccgcggaattcgatctcccagctgcacgcgcacagaatgactcgcgactgaagtctctcttcgaacacattttcgcgaaatatagcaaggacttcacggacgtcggtgatgagattgacctgcagaccggggatatagtggtagacaatggacatctcctgggtatgcggagcgagcacgacgccggccagccgcgatcatggctctcccagggtgatctagaggacccagatgcagacgacgacaccgcgaagggagaggaggatgaattcttctctatggcatcttctcctggtcgttcctcggctccacgcgaagaatcgccatcgaaacagctacagacagacatggacacctctttagacttcgtgtttacatttaaatcatctgggactgcagggcacagtcctacgaccaaggaagaacaagcctcccatccgaccaaccctagcctaccttccaaaccacaagattcaatctgggcagtcccagatctacctgcatccttttcaacccccaccaccgaaacccgcaaaacaaacgcgggcttctcttcacctgccactgccacagccagatccccgtccccgccagggagcggctcaatctgggctgtgcgtagaccccgcaagccacgcacagaaacgaaacccaaggccacgcccagcaagcgtcagccagccgcgaagcgcaagtatcattccagccctgtcacgcgcgactggtcttttgcggaagtgccagatgggaatgagtccgatgacccgttgcaggactatgagccgtcgccgacgccatcgagggttaaaatcattcgtggaaagcgtcgcgttccgactaaggttaatgatggtccttctactccttccaagcggccgactgttgttattgaagttgagcggggtgatcgccaagagggggggtgtggattaagtggccatgcggctgaggtggctgacgcacatcttgaagaacggggctacgaactaagtggtggcgatgaagttcctgatacacatcttgaagaagggggctgtgaatcgagcaatcaggtagatgaagtacggcaatcgatcaatgtatcggaagcacgaaaaagcccgcgaaggtccgatcacatgtccgaccatcaagagagatcggtggctgctacgtggatgaaagctcatttacacgaacaatggaaccaatcgagattcgtcagagaatatcgcgctacttttggtcgaagccgaacttatataaccctgaagagatggatggacgagaaagagaactctcaagcgaagagatgtattgtcataccgaaagttccggttacatgtctgcatgagacgttatcgaatgatagttcttcgtcgccaaccctgggtctttcgaatggtaagctctgtgtgccatcaacctttcggaatgggccccccgaggagtccaaacgtcgctgggacgtagcccctattaagatagaaagtggtctttctagcttgcctgaagcatgccctgaagaagaggaaccgagcattcaggtagacgaggtgcctgaagtacgccccgaagaagagtgctgcgaaccgagccaccaagaagacgaagtgcctgaagaacaactacgagactacgaaccaaatgatgaagaaaacgaagtcaccgaagaacagctgcaaggaggctgtgaacaaaatgaccaaaacgaaacatctggatcagaatataaaaacgaactgccatgtaatcctatggtacacgattccacccccaagacgacagccagcatggcttcatccccgcagcccgaaaacaccccaagcaaaaggcagcccatcacacccgacgaagcaaagttgatcgtgtgcatgatgcacaaacaagaaaagaaagccagcgacgtaatgcatatgttgccaggtcgcgaatacccgacagtctggcactggttctacaatcactggacccggcgtcttgccaatccgcctcccctttccgctgcctggtcgcagcctgagctggtatccctgtcccgactcagcacccaatcgggtcttacctggggtcagatacaaagtcgcttcaaggggcgatcccgacacgaggttgagtttgagctgctacgtgcttttgtgggtgagggatttccctctgccatggtatggaacatggaggaacaggtggagccggaagagctgccggcagagctgcagccggaagaaatgcaagacgagataaataatgagccgggatctgaagcggccatgcagcaagccccagatgaggtaggaggtagtaatgctgcatgcgaagacattgcccaggaagagcttaagcagcttggcatccaagaagtgaccaacgccaccgacagtaagacgccacacaacttcttgggtattgttatagatttctgactatagcgatagtgcaaccggattataccaatacggccagtgattgacaatcgacaatctatccacacgtattcataacatgactaccataccattcaatctatatctaatgaaagtcttcgtcctgtgcattcataacatcctcaagcttcgtatcaaccgccccaccaacatcaccagccttggcccagaatttagacagatgccgtgaaccagagtccgaaaggaccgtgacaatccgatgacctgggccaagcctcctcgctgtcttgacagcggcaacacctataaagcaccataagtaaaacacatgtgcgctaggcaaagagggattcaacccacaattcactgcactgctgctcccaataaagatcccatccttctccacaagccaccgcgccatagccaaagcctgtgcatcagtaacccgcaccgcatcatcaatcatctccttccccgcctcgaagttcgccgtgacccggttaatgccaataccttcaacgatagtatcaacctgcggacgccgccgcgtcccctcccgctccttaacatcaaacataacaccgtagaccactcggttgaaaagcccacttccctgcgggtcagccagcacaacattaaggctaggcagcaagggctttaaaaacctggccacgccagaaatagtgccgcctgttccggcgcccgctacaaacgcatcgagccggccaccgcactgagcgtacagctctgggccggtcccttcgtagtgggcgcgccagttagcctcgttctcgaattgatcggcgaaaaagccacggccacgggtcatgggctcgtgtcccgcggggggatcggattgcccttccgctgatgcagatgatgcagagggggttcccgatgaggccgtgtgcgtctttgctagtgctcgtgcgcgattgacaaagttgtctttctccactattggcgctggcggaacccgatccacgattgccccgagtttcagcagcaggtcggatttttcaattgcctggtcggacggcaggcagctgggttgcattggcgttagtgttttttgctattggtgtgatgccagggtggcgcatacgtacatgtgtgctaggtagccttttgcccgggctagtgttgctagggaaatgccggtcgatcccgatgtgccttcgtagattgtgtcgcctgaatggggtgtcagaagaccttgttcttcggcctggttgaggtcagcgatgctggtctagtgcaggaaactttttggtttttgcgtattttagcatacaatctcgatcatgcttagtgccactcggtcttttgagctctggccagcgccattcaggaactgcggcactgttagcgcattcttagctcttttttggggtggttggtatactaagtactagtcacatacctctgccttgcccagaatctcacatcccgtctcatctgatagggacttgatccggaataggggggtgtttccgatacaaccttcaatgccttccacaatagagggcgggccagctcgggtgccatttttgggggaggttagttctggctcattatcctcatgtctgggacgtgacagttcttgatatgcgagtgccaagcagacaccggtcacgaaggccgtgcctatatacgccgttgaatgatctggcatcttcccatgccgttatgtcttgatagaggttatgtgcataggatatgaagctcggaccgtcaggctttttggtggacgacaggagtcagcttatattccgtacttcgatgaaagaaatattgaaagctaattcaaagagttctttgtattcaaattgcattcagttcgaatattgtaatgtccaaagtctcgaaaattgaaggtgatgggtttcgcctgaggcacgtggctccggtcatccagaagccgttctttccgttccccggaacaaccgtgagcttagctctacagtcacaatggactcgccagtccttacccagctgttccgacagctcttccgtcatccagcatgtcgatctataaggcggtcaccttctgtacttgctcgaccacagtctcgatcatttcttacgcgacgcacccctgtcaacgtgaagcgcaaaccgcacgaagaaatccagctatggacaaagcggggagactaccccaagaacatcgatgaggagtacaggaagtacccgacagttacagcgaaggagctacgcaaccgccgcgaacggccgcggcaggtcaaaatgctgacacgcgagttcatcgacggtgagttcgacagctcggtgaagcgtgactagttctgatatagccgtagacagcctctacaacccacattatggatacttttccaaacacgccaccattttcagccccggagagccattcgacttcaacaacatcgaagacgggcccgcgttccacaaactcctcggccaacggtacaccgagttcgaagacaagcttgatgcaacgaaaccagatatcgcgcggcagctgtggcacacaccgaccgagctcttccgaccatactatggcgagacgattgcgcggtatttggtgtcgaactacaagctgaccctatacccgtaccacgacctgatcatctacgaaatgggcgcgggaaacggcacaatgatgttgaacattttggatttcatccgcgacaccgattacgaggtgtatcagcgcaccaagttcaagatcattgagatctcgcccgcgctggcagatctgcagtacaagaatttgaccgacaagctcactgccaaaggacaccgggacaaggtccagattataaaccggtcaatcttcgactgggacacatacgtccattccccgtgtttcttcctcgccctggaggtgttcgataatttcgcccacgacaccatccgctacaagctcggcacggaaatgccacagcagggtggtgtgctgatcgatgccgacggcgagttccatgaatattacaacaaccagctcgacccagtcgcagctcgtttcctgcgcgtgcgccaagccgccgcccgtcgtcctttcccgagtcccttgggcccaccacttctccgcggactccgctccgccgcgcccttccacaaggaatactccctgccggagtacattcccacccgactgatgcagttcttcgatgtcctgaaccagtacttcccagcccaccgtctcgtctctagtgacttcaattccttgccagatgccgtgcccggggtcaacgcgccggtcgtgcagactcgatatcagcggcagacagtgccggtgtcgactccttttgtatgtggatgtttctaatgtgactttgaatttggctgactttttgcaggtccatcaaggctactttgatatcttcttcccgacggactttaatgtcgtcgaggatatgtaccgtgctattacgggaaagctgacgcaggtcacgagccatgaggagttcgtgcaccgctgggcttacattgaggatacggagacgcggaatggggagaatccgctgctgagctggtataagaatgctagcatgttgatgactgtgtagatatggacgatgtcaatatcattcaaccatgccttgggcttcgattatagcagctccttctctgcgggagtgtaatttgcctcaacagcggtttaaccctcaactcaatgcctcggtggaagtcattgcacatcctcaccataaaggataatcccgatgacgctcggggccatcacacacccagattgtgatatatgggagtctccgttaggctctagatgtcgtggcaaaggccgcccactggagttgtcaccatcaaatgtttctctgccaggtaatcgagagagattttgagacgcttcagaatcgaggcgacaatgaaaatgaatccaggctcaagagacaccaatttccagtttgacaatcccaacccaaaattagaaatatccagctctccgaagtgatagcgctgtacttcccaacaaaccccaaaaacacaagagcaaacaccagcctacctcctaattctgcggaatccgaaagacaccattagcaaggtccgtaagaaccccaaccccaaactccttaagcgcatcaagtatctgctcaacagtagtctgcgccagcccccccttatccctcgagtaaatatcaacgcccgcaggcgtgaagagcgtcttagcaaaatacgtaacaacccactcgttcccatcatcgccatgcccgaagccgagaacctcccagtgcgagctcgcgatcaccagccagcctttgccgcgccagtcccaggcgccgggaacacctggcgtcggggtgtcgatgccatggacggattttattttctcggagtcgatggattggtattggactaggtcgtcgatcttttggactccggttgaggagggggggaggagtgtgtaggttatgttgacgttgcgcttgtttttccatagcgggaggctggagtgggttacgtgccatgttccgattatgaagtcggttggtggggggttcttggttcctgagctggaatatattgatgggaggctgagggagattggagacatgtttttttgggcgcgtgttgagtctatggaggtgtctggggtgagagctctggtggcgtatattggacgatccctacctgaaggggtgttatcgtcgatctatgcaaccctaactcgcgatgaaagagatattgtcgaagtagctgggatcactgagcaagaaaatagcgcaagttaccaagttgaggggcactaaatcagtatttgaactgatgatactgatagatgctacgaaagtatactttcgtttgcttcaaacaaataaatctttacataactcaagagaggatagtaatcaaacattaattcattcaagccggctcagagcaggagagtggcgatacaaaaggatacacatacatatcatttctccctgacacaagcagcatttcacctaaggccaggtaatctcctaagttattctacatgaaggtctgagcaaatgcggtctgaccaaagacaggctgagaaaaagccaaaccaccgaagagtggctgggcaaaggagagcttctcagtaggacgaaaatggggaatattcggttttggtcctttcggaattcgttgaaccctctccatcaatgaggtatctggaggaagaggaggatcctttggttccggtgcgagaatattcgttgtgatgttcacgttgttgattgaaattcgcgagtgcgtagaaatgcctgccttgcgattgagcccactaagggctttatctagctcgtagagaatagcagcgttcagggaggctggtgtgcaacctgctgcagggtttatcacaggcacggtgatgttgaagttctcgagtgttgtgcgtgagccacgataccgtcttcgccagatgtgctcagggacgaatagtcggcagtggcgccaggagtggccgatctctgcacacttcctgcagaacgcggtgcatgccccaatatgatttctatcgcaactgtcgcagcgagagcgataggtctcctggtaggatctctctctgccgtcttgacagaagtgtgggcgcttgtaccgtgggtagtcgtattggtcttcagcttcatcaactctggcacgcttattcgtagtcctgaatatttccttattagcggagaccttggatgagactctagatgcactctacacacgtatattccattttgacgcgcgtggagagagaaacagaaaaacaaaacaaaagaggagaaggtcgggggttttgtttacttgaacgaacgaggaaggaacgactctgtcacatgctgaaggcaaggcaggctctgattcttcgtgggaaagagcgagtgacgagactgatatgaaagaactcatcgggcaactgcggtcccagtctataatgtctgcaatataatgagcaaactcttctataagtgatactctcagcttatttatctgactatcaagaatcaagaaacttctatgtctaaagttgaattgcaagtgtgagaggcttaattcatttaactatggcatgtttggatcattggatttttcatagaggaacaaaccccccggcatcaattgcgctgcgctataatctccgattgtcctgacacacaagcatcaatgaacttttgtggaagcaacccgagtcgtggatccttccctgcaactgacagtagccttgctgctacatctaggtatgaagagctgaacgtaatccagagagacatttcgggctcagaatcttccgatgggcgggggtaatatggatcgttctcgaaaaaagcatccacgagatgagctatcaagtcatccggcctttccagtccctttcgttcctcccatatattgcacaaattgaagtcgagaacccatacacaagtggctcggcgttgaagcttgtcacgtctcatgctttccaggtctgagtgaggggccatctccatgatattttctgcgctgagtcccaacgaacgagagacatcctgggtgtatgtctctccttcgctccccagcacaaattcaacatcgtagcaatccacgtttgctgagcagtgcatgatcgctaaagcttggccaatagctctagcataatgctggatgggtagatccagctcgatcatctgatcgaggcacaagttgaagtttctcaatgtaaaattgcgtgatggcgggtcattcgcaccacgccgacgaccaagatagatacgggcgagacaatcacggttagtgtcttgagatgccacggccagcttcgaggaagctgggcaataggtatcgatgagagcttgtcgagcaagcttaggcagtggaagtattcgttctgtgatcaatgccattgccggtagagggaaagagaggtgtgatccaaacaggttgatatgggagtcccaccacttatcgtttgtctttgggacgtatgaaaaaatgttgggaacccgtacttcgacggactggtttgtgaacgcctggtataccgcgagatgggcttggaaatctgtccaaagggcattttcgaatgatggacgggcgatttttatcgcataggcatgcccaggccgctcgaagataattccacattggccaaagccgatgctgcgataaccaatagaggctgtgtgctgttcggtgttgggtaatgcggatggggacgtagaaatgacggaactcgataaaacccggcttaagacttcacgcggctcggtggaaagaagatgcaacgctgaagcaagctcttcatttcgcgcagcatcaagtaaggcggataagctgttggtaagctcgatgctcacttgattgtgtcgatccatgtcagagagaagtgaagttgaatgctgaaatgacgggaccggtagattatctttgaggtctttttgatggtctttttaagagtcctttaggagtcctttaggagtccttttagataggtcgagtctgaatatgatcaacttcaagcacagggtgtggtgagaaggagacaatgtgtaaaacggggtgagctaggcagccagctaaactacggcttatgtacaaaagatatagttcaagtcaggtcaatagaaactatttactttgatctgttcgggatatccaatatctatttagtgaaatggcaagggtgaccaagctgagtatggccgtgtatatgtagaagccagactgttttcgtgtattttctacaaacaaacagagacttatatagatgaagcctatcaaacaggacaaatatggcaggccattcacctactcattctctcttcctctccctcttcctcttcctcctcaccttgtctttctgtgcctagctctaaagaaacgagatctttcttccttctggttgcaaaatagctgtatattgccctacgaatgagtgcaacttcaaataacccatacgtgggctgataacccaaaggagttgcataatcaactcaaaagaccgttattatatgattagcattggaaataacaacgactacagtattggaaattctattaaactccaagaaactgtggctagatgttcaaattgacaaggcgcacttgtccccgccacacgggcagacaaactatagggcattttcaaaggaagcaatgcgttcatgaaacatatatatgaggaaatgctttttcctccatggcttggagatcccatcccagcagccatcaatgataaaaagtagatacaatgcagccaggccttgtcagccagaataaaaacatatcccataccttcatatacgcaacgaccatatcacaatcaacaatagcctagaattcaaactccttgcggaagatgttaacgtccatgccggcgacaacctggtcagccaagtcacggcggcccatctgactgaacacacgacgcagagtgtcgtatagattcgtgctctgattctggctgatgtgcaacatgcgctcgaggcgctcgtcgtccaggccatctggatgcacaccgtcgctgatgatctcacgtgctcgctcgcggccctcctgctctacaacgcggtgcatggatagtgcgcctagcaggtgctgtgcggcttctgggtagcagccgatgttgatgcaggatacgcctaggttgtagcgggcgcgcacaaaattgggattaatgttgagggcttgctcgtaggcttcgatggcttcttccgagcgcccggagttggcgagggtcgcgccgagtcggttccagaggaggtggagctgctcttgttggttggtgctgccggactcggtggaggctagggcggcggagaaacagtcgacggccttctcgtattcctcggcgcagtagaacagaacgcccagtccgacttgtacgtcggggtccatctgggctcctgagggggagagctgggccgcttggatgaatagttctgttacgcggtcgtggaggagttgacggtctgtgaagccgaggtctgaatcgccggatacttccttcgggtcgatgatagtggggtacttgtgggacagccaacgctcgagtgtgcggtaggcggttgagtcgtagccctcatttgtatacgagacagccaagcccatcaaggcatctaaattcccggggtcgacctttagcgcttgttccaatgcacgaatagcgggcaactccttttcgttctgcgcctgcgcagagcccagcatcgtccacgcttgcacgtgctgtggatccttctgaaccgctgcctcaaaagccagcgctgccagcgacagattaccgccgtcacgcataattttcattccctcctcgaacggattgccgacagcctggtagacattatcctcctcgaacatatagtcgccgagctggggatctcggaaacgagagttgagactatcaaagccatcccagtcaccgaggtcaccaacatgcacgttatcggtgacttcaaagttatcttcctcggcaagttttctgctcgtggtctcagcctggacccgttgccatacagactcaaaaacgtcattgaagggcactgacctgtccaaatcattcagttccgcctccatcgccgcattagcctcttcgtccgtccgggtctcatttccaaccgtcgcagtctccatttcagcaaactgtgcctcccagttttcatcgtcgagctccaccatccgccccttccccttatcctgtgtctgcccctccataggcccctgttgcatgcccatctgcccacccatcataggctgcatcatccccataccgcccatacccataccacccatataaccaccgcccatcgccatcggccgctgataccccgccatcataggcgatgcgttcgcggcagcaggactggaggtctgcggcatgcccatacggctctgctgttggaatcgtgcaaactcggcaggactaaaccccgatccgttcttcatctggcccgggaacgcggcttccatgcgcgcttgctcgcccgagtcaaactcccctgcccatcctggcgaccctgtgcgggccgggcctgtttggaacttatccagctcgcggcgcttgtgctccattgcgaacggctgcggtgagggtccgtttagttgttgtcctggttgttgcatgaaatcgtccatcatctgataaggaggttcccaactccgagattaattttccgttgctgattcctttgcgaggggctgtgtggctcacctgatcctgtccgcccatcatactatgtgagcgcatgccttcttgcatgcctggtccccggcctaccagtcggtcgcgctgtagtgatttatcatcctggacgtgcttcgtgaattgtgagagcgggttccccgcagtagagcactctgggccaccgaggaacgacatggtgggtatgtggcggtttaagacgaggtagtattaatggaaattaggaagagaagcgaggacaatgtaaaggtcgaggtgcattcccccggatatcgttcgacgtggggctcaagggctttccgcctcgtcagccgaggttccccgacggcagtttgagagtcacgagatacacgaggtaccaggtacatacaacagttgcatatgaaaatttgcagaatataccaggatgcgactttgggcttattcgataccattcatcgttgtcgacagaggttaactggtgcgccaaggcgtcagatatgcaagtttgcagatacagctctcgtctccggatctttgccacctgtcacttgtcctaattattgaacatcatggtgttttcaaacgataagatctaatttgcaagttatatacacacgaatccatcacatagtaaaacccgaagaaaaggctagctagggcgtcgtaattgatgcctttggccgtaggatccaaaatacagcccttatagatccctaagcctgaacaacagtattcaaaccgaccagaatattgtacgaagtatattactataggtgatattaaggctttgcggaaagatttagtactaaaaactagatcctagatctatacattgaagagggcagcagaggcaccgacagccctgcctgcgatacaggtgagagcaaagtcgtcactgggagtagtaggacgccagagaggagaataccattggatgactactaagaagagaagaaggtggaaggtgtctgcgttgcggtctctgtctcagggacgataccatgtacccttggtatggtctacctagtaaaaggtacattttcccgaacctctgtaattctgtaagaagggtaaggatgttgaattcagtgtagattcatcccttacatagtaggcttagaagtagacagagggcatttacctagaaattatgcaaaattctaggcagcacttggaattttcacgctaagataggaaccctcagttccctgaggttcttcccgctgacatccatccttcaacactgaccatgtcgagcagcacacaatcagacaaccccggcgagaccatacgtctggccgtggagcgatttcgcatcaaaatggagtccgcggatcggcaattcattcaagaccgcgtcgatgagatcgaaactatgcatctctcgaccgatgaaaagaaactgagtcatatgcgtcgctactagtacgacttaggaacgacaagctcaagtgagagctgggatggtaacgctccccttggccctgttcagcaacatcgcgaggaggcaaaggtctcgcggctagaggacctgaagaccacatttcatcagtatatggatgggatcgttccatcaactatggcgccagatgaatggcgcgaaatgtttatgaagactttcgaaagcgtgtctaatgaggctcctcggcatgatgacaacgatgatgaggacttttatattctgagaagtgatgaactggctcacttcatcaaatatgccaatggtgtgcacgatccggactctcgtcactcgggcatctctccgtgggagcccgtgcctccaatgagaatggaaattcgcgagtatgcatatacggatcgtccggctgttcaagcactaactcctcctgacatcgcgaaagcacgagaagaattgaaggagtctcttgaagacaggctgctagacgaaaactggatttggggccattgcggctacgaattcgaggtaaaggtcggtttccatactggcctcggctcgtgtatagaacacgatgcatggtatagcatctatatgtattgtcgtcaatttgaagaagactctgatccaagtcacaagtactggacatggcgggttgtcatttttagcgctgatattatgaatccaaccgagccgatatatattctagatgtccaaaacaagatgataatctagctattgccataagctcttctaatagtttcatgtcgacaaagacataaagatcttctcctctggaaaccaggagaagcatcttctgcaagatgagcaaatagagagagtgccaaactgagcctctgcaggtcagataaagaagctgccaacacaacataaagcctacaagaggcgcaaggatactgccaaagagatttctagttcctgcccagctggcggtgatgtgttgtgccgagttcagcgaatgtctcatcagtcgaagttgatcgtcggctggagaccaggcaatcaaaagatgctctcgtgaactgcgacagcaatcgtcaagtgtattccatgggatttgatatgacacttagttacggcaatagtacgtgtagatatgatcattctacggagtacttaataaatatcgcgagttaagaatgcttccgatttccattttgggacactattgtacatttgtataattcacatataaccctctctattgcttcttctcggtctcggtctgttcagttacctgctcagttacctgctcagttacctgctcagtcacctgttcagttacctgctcggttaccggctcagtctccttgatctcagtaacttccgcaacctccttcactccgcgcactttccgatctctcatacccgagaccgactcgatattagtctgagcatccgagtgttgcttgagggagttcttcttattctgctgcctcttctcctggttacgcttgtgctcctcaggactcaagaccttgcgcttagcaaagctgacagtcagcttgcggccgtaaggcgccttgcgggagagaacctccttagcgtgagaagcgctggcctgatcggcaaagtcgatgtgtccaaatccacggggcaagccagtgcgacggtcgatggggatacggacatcagtgacaccggggatatcgtcgaacatatcctgcagatcctggtcggtcaattcgtagggaacgttgccgatgtagagggtcctagtgggcttggtttcggccatggatctgtacgtcgtgttggagaattgcaccaccacctcgcgaccttccaggatgcctccgtgctgctgcgtgattgcttgcgtggcttcctcgatggtgctgaaggtaacgtagccgaatctgtaagggagaatgggtcagtctctagtaggctttcggttgcatcggtcttgggaactcaccctttgctcagcccgcggacatcgtgcacgatcagtgcattctctacggcgccgaatttctcgaaatgcttgcgcaagtcctccgcggtcacgtcgaagaagaggttgccgacgtacacggtggtcttcggtacagggccctcgctcaaatactcacgtcggcgttcttctttgggcacacggacttggccgggcgtggatggctccggtttgacagtcgagatatacctaatcggaatccgtgaacggccttcatcggtcgagtttaaccgtgtctgtgtgagggttgggtaggcgaaccgagcggcgagaatcggagtggagcatgttgaacgcaacactgcactgctgattgatgagcgtgaagcagctggggacaattgaagccgagaaacggcccggcggaagcaatgcctagaaattagttgttttagcaattgtcctcaatgttgcatgcaccagcgagtacataatgtatacattctcggactcggactctgtactctgtatagctcacattttgaattaaaataacacaagatgcgttgatcttgtattagagataatatgatgacaagagaagaattgcgcgaagccagataactttttttcccggaagataacacccggcacgtgactgatatagccaatgataaggaggtagatcaaagcaatggaaagcagtggattggagattttatatagacaaaactcagggtttaggtgataaaacacgaagtaaacgtgagatttgataactcaagagtggaaatatggcagtagcctcatagtatgatacattgtccaaccctaacaccgacagaatccataaacgcaacatattttcttagatcggctgaatctcgccagcacgcatacatatccatgggaaagaagaagtagaaattgcttcgttacttcaagtcatccgatcaagaaacaaaacatttccaggtatcacaaatggccaacattttctggcaaaaaggggagagaaaaaatcatgtagaataccaatacaactcgttcattgggaaccttggccccgactatcgttttgttgaggcatgggcgccatgccgtaccctgttactggcacacctccactatcgggactgttggaggatactgagtataacgtaggccgaggaataccactaactgatggtacccgccctgaggctagaggactagacactgaaggctgtgacatgcctccagactgtggggttgcttggcgctgtgcatcaatcataggccagaattgatttgttgtgtcgagggttgggttttgaatgtatgtgtcccaagcatcctgatatcaacatgtcaacattgaacaccgggtcccgaaaaggaaaagacttacccaatccagattaacttgcgtgtccggcatttgcccgaacatgctactaaagggcgaaagtacacccggcatttcggccgaagcgcccacgccacctattcctgttcccattggtgtatctcccatcttgaacatagggtcagcaaagggcggagggcccgggttcatcgggctcattccgctgctcaacaggccgagggtcatggccgcgttctgcttctcgtcttgtggctcaaatgaagctccggcgctattttcaaggcctgggaccgacatgtgcagcttgctgagcatcacaccgagaaggctagacgccttccatgcttccatgctctcatcacgcgactcatcccaaatatctttcgagagttggatcgccgcggtcatttcatcccgccgctctcggccccatgtgtatgtgtctcccgatggccggccggtcacctgcaatgatacgccgtggtataggtcgagactgacaatggtggctgccagtaagaagtcggctgaactgagagaacttattcggctctgacgaccacggaggcgcccgctgtgagtttccgcgtgcaggagcgcctggacttgcaataactccattgctgagtcgatacatgtccttcgagaataggtgaaacgaggattttctcgggcgcgaaccagatatgggcgatgaagcacacactgagccttgttgtatacggccattacctgcacaaacgattagtgttgatgcgaattgtggccgctgtcagacaacttacgaaaaatcgcgacatgataacattgataggatccaactggcactcctccataggccgaatatgcaagtgctcggggatcatgtcccttgcctgtcggagttccgcgtcgacttccatcaccttttcgtatggggccgccgatacagcagagctttgttcaaccacacgtccgaatgcatatgacaggcgcgccttagcaatcatatatgagattggggttggctcattcaattgacgtggtggcgggagctccttgcagtcttcatcgaaatcatcatcgtacaaattccgtggtagctcagtatcgctatctgtactccggatcatccccggcaacccgacctggtatgaaaacagaaggtcggcttggcgcacaaaggtccagactcgccgtcgcatctcaccctggaaaggtgtgatatttgggaacattttggagtcacggtgatatcctgatcgcattgctaggcgaacaacaacgccggtcatgacccagatcgaaatatccgcctctcgggtctgggagaaatcgccatgcagatgaaacacgagcgcttcaatcaagaacgggtggggtttcgtgtagtcagccaatgtcaagcactgtgctacagaattccggaatcccccagccatgtccatggacttgccccggaattcaggtggctcatcgccttcgcggtggtaagacagcattgccagcctcatcattgcaaagagcatggcaatccagactagttcggtcgcggcaggatcatcccaatgtttattatactagcagagtcagattctggactcaatgcaattattctcgaggagcttacctgtgcttggaatgtgggtccatggagaacatctaggtaaagtcaggatcaagaccacaagctacggagatagcaaatactcacgggttgcagggtcatagcagttgaaatagcgagcaataagaatgtcagttgtatacttagacggcaagccagtcatgatctcgctacggctcatcggcttattgataccaaacaacaaagtcgagcctgatgaatcagtagatggtcgggccgccttgactttttcaaattgctcatcaagttgcttcttgtgcgttgtgaagaaacttcgcacctcggagatctattcgatgagttagaaagactcgagtttggtcaaacctcccagacttacatcgtttaatacagacgcccaatgagcatcactgatgtaataggacttgttattatccatcttcataataccaaacgacttcgtcacctggtccgtgtcgctctcttcggcgccctcctcttcgatatcgagatcatgggagaaccgagtcgagcccacactattttccccggagatcgccgccatggcagcagatggacccgcagactgagagccatttgtcatcaacgaaagaaccaagccttctaaccgatcgatgcggttttgcatatcatccggtgtagtggatgactgctgggacgagttcttcttgcgcgagttgggttgcgcgtagttacatgaagcagcatctcctcgtttgacacagttttcgcaaggattcgtacgattgcatttcagcctagaaccgttagtaaaataaaatagaaggtgtttcagccatgtcttgaatacttactttctgtgtcgacaaggcccacatgacaaaggtactcggtttcgtttccggacaactctgtaatctggagagtggccagcactcgacgaatttgtagaagggggtgttggggtcattttgaatggcatgatcatgtatgggtaaccgacttgttgtaatatcgacggtaatccgcggatgatgcagtgcacgttgagtcaacgttccagctgggcggggctctcaagcacgctgtggcagtccgcacagctctaggatcgaatcaaatatgctactcggttgttctgctagctcatccgaacaactttctcagtctgattgcaagcccacttctgaatatctgcgcggggttccaaacgcgattttgcttccttccctagtcgtagcaaggtatgtacagttgggcgcaacttcaatgccagatttggctcgtgttctaggcaaccgtgccagacccagaacttgagatgtggttgatgttgtacgcgactatttcgggcggtcaggggttaactaagccgcacagtatcactagacagatagcggggcaatgcgacgaacggatgtgcgttgtcgaagcttgcgatgtgcgatggccgaaggagggggtgttcggtgccgcgtggataagtgtggtcgggaggccaagtacagattcgaaagactatagagatattttgattcaagtgcgatcaaggattcttctcgagtcaacgatagcaacaaagaggtgatcataaggaaataaagctaggtagacacctgtggacgaggccccaacgaaatgatgattaatccgttatctccgggcgatttttcttatcaccagatgatctcacctcctgcaagtacatagagaggacggagtatccgcactccgtatatattgtgaaatagtctattatcttcgattcgatacatgaataccttcttccctcttgtgaaagctgatccagtcgatactttacccctatatcatattcattccttctctattttcctagacttgatgccgattggctagcaatcgacgatcagtgactcataggtagaattcaaccagacatgcatgtctcgaattctaccttgtgagtgggatctagactgatgtctagtttggaagttcgactcacactatgtagactgacttcgccattatggtacttgttcgtatattccgagtttaagcttaaaaagaggtgttagtttagtttatttaggtttacggatacgcctcgttttatcgctgtgtattctttaggtaactagtgcatgtacaactctgattaagtaaccctgaattatgtcaaatacacatttctcgtgcacaattcacatactttgtatagacaaactcggtgtcgtttccctccgcaaccatatagtatgcatccaggaagatgtcggtattatatacatccctttttcatcctttatgtctaaaggaacaggtgggttggaaaacgaaccattatcttgatcgatcgtatctgctcccatggacatcttactagctttcttccactttcagagacttggtgagctttcaaattgttgagcttggacatttggctttgttgtatggagcctatggatattaataacttcggggcttgtttagcaaatgactagaaaggcccacttctatattctttggtagggcaaggtggtcgagtctggtgacttataggacttatgtataagagcttaggctaactatggtttgactctatatttttagtatcgagagacaagtttaaccttgttacgctgcgaagggtcctcggttgttgaacgtcgtctcaggtgccgacgcacgggctacactcaaagaaggggtatactaggcatgcactaatatggggaatagcctgggtacggtctaacggacccatattgcggggtttaacgaatgattagcttgcactttgtatagggtactgcttgttggtcgagatacctctcattcctaccaaccaccatcgttcatcggatcctaacatgcacaactgccgatcgcagcgtctttatgtacgccaaaagcattttcaaatgctgacttcttttctttctagcggggaagattacgtatatcgtgggatgtgatcctgtatataacgtgcctcctcgtggcttctattttgaactatgtaggtctaagcaatcggacacaactatggctatcattacagcggttttccctgatgctgcatttcactatattttctatgcagttcctcttctactcctactttaccttgcccataattatttctacaattcgctaaacctctttcctggccctttctgggcgcacctgactgatatttggcggtatatcgatgtgaagggtcgacgccctgagcttacgcatatagccttgcatcgcaagtatggcgatatcgtgcgccttgggccacgcactttgtctttcgcagatccaaaggcagcgaaggtgatctacggtctaaacaaaggattcaccaaggtagagcagtgtcatgccgagcccagaaacatctacagcttctaatcaagagaacagtccgagttttacccagtacaaatgactgtttctaaaggcgagccattgccatcgctgttctctactctagatgagagcttccatgcgaatctccgccggtctgtcaatcatgcgttctcaatgagctctttagtacagtatgagccaatggtcgatgagactacgaaaattttcctcgaccaaacggaccgcctctttgctgatggagccacagtgtgcgatttcgcacgatggctgcaattcttcgcctttgacgttattggaagcattacatatagcaaacggcacgggttcattgagaaaaacgaagacatcgatggcatcatcaattccctggcaaatatcttcgattacgctgcccctgttggtcagatgccgtggctagataagctattttggaagaatccgatatttgacttccttcaaaaattgggcttatcagataattcacaccctgtggccatcttcgcaaagcaccgcatggaagaacgtctgtcagcaaaggctggcttagcagacccgggatcaaaggatgatcttctcaccatgttcctcaaggcgggtgaccttcgtccagatttcatgacgaacaaacggatccttacaatggctgtctctatggcctttgctgggtctgaaacaaccgccatcagcattgcagctgtgttctattatctacttaagaacccggagtgcatgagacgggttagacaagagctggacgacgctgttgagaacggtatcattgtgaaccgcccaacaggacttgtctcatggacagagtcgcggcagctgccctatctcgatgcctgcataaaggaagctttccgtatgcaccctgctgcgggacttcctttggagcgtgttgttcctgcgtcgggagtagagatctccgggcatttcatccgcggtggaacaatcgttggctgcagcgcctgggttattcatcgccggacagatatctttggtccagattgcgacatatacaaccctgatcgatggcttactactccaccggatcaattgaaggttatggatggaatgatgctccagtttggtgccggttcaaggacctgcattgggaagaatatctctctaatggagatttataagattgtacccagctttttgcggagatttgaggtatgttctttttcctaggcggagaccagtgatgctgagttcttgataggtacagctagcacaccctgaccaagaatggaaactgtggaatgcatggtttgtacgtcaacacaacttcaagacgatctttactccgaaagagattatagtatgatttgccgtcatcgtttagctcaagtattgaaacttgggagttgctatactttgtagaaagacatttctcatgaagttcaacaacagagatcttctttctagacaattgtcaggtttaaaaaagaagtaagcttttatgaaatgctgacgtgatacttctttcgggatatataattttgtttctgactagctttgcagacggcgcctatcaattagttaaagatgcggcggtgcctttcttgtatcgtaaccctaaatagagtaatatgctcctgatataacaacaggtttgtcactagttattatcctatagattcaatatcagggatccaagaataaagagcaaagaaaatccccgcccaataccaaccacaccatctgcgcatatttaggctgcaacatgcaactgacctatccaggcccgcctttccctttagggcaaggcgcagctgaactgggctgaaatcattggatatgccgaatcctcgaattcgtaatgtctttacctagcccatatacaacatactacttgaacccatgtacacgcagagctacagcagccaatggaagtatacatctactaactgaaacacagactagaagtacaccgctatatccctatgtctaccggttaaccgtatagactacggatagtcacagtagtagatatatgtgctttttttctttttctaagcagtagaagagctgttaagagtcacaataactatctactatattagcaatcctgtatatacatactaagcccatgatagtagagaatcgtgaggtgaggaagtgtcaaagtgtcatagccacaccattctacagctgcctctgggtacttgcatcgatgtatccaattgtcacctatcttcacactatacccctgctacttggggccagcgcagcaaacaaagaacttgtacaaacgataagtgcgtccactccaaatacttaataagccgtcaatccccattcccgccaatccgcaccgtccttcctttttattttgacgtcctcaaacccgtaaagtcatcttcatccaagtttatcttattatgagtgacaatcggggtcgtggacgtggtgatcgtgggggtgaccgtggccgtggccgtggtgatcgaggtcgcggttccgatcgaggccgtggtcgcggggacagtcgtggtgatttagccctccgcccagccggtagaggcgatggaaatcgtggagatttccgaggccgaggcggtgatagaggtcgtggaggcgatcgtggcagaggtgacttccgtggccgtggtgattttcgtggtaggggtgatttccgcggtggccgtggtggaggagggcgtgggggtgctacaaactttggcccgcctatcttcaggtttgccttcctcactcttcgctgctcatcaaacaaatctaatcctttggctatagacagggcgaaccaatcccaccacctaaccccaccgtcaccaagaccgagaacgaccttgccaaagctctggttgtgagtggccagaagaccgtcagacaggcgaaatatcccgaacgtcctggttacggcacagctggcaggcctgtgactttatatgcgaactacctgccgttaagcctgcctaacaagcagcttttccgctaccatctttccattgcagccgactctgcaggccgatctgcccctgtgggcaagaaggcccaacacatcgtgcgtctgctgttggaggagcacttcccacagcaaaagaacagcattgcctcggacttccgctctaccctagtctcgtgcgtcaaattgaccgagggtaaattcgatgtgcgatacaaggaacacctggatgatgactacatcgatcctccccgggtgcaccaggttacttgccagtatactggtgaggtcaatcctgccgacttggtcaactacctgacctccaccaatgctggtgccatgctagaatccaagtcggagattgtagctgccctcaacatgatcatggggaaccaccccaagacggacgatcaggtcgtctctgtcggagccaacagacactacagtctgcgtcaggataccatggaatcgttcaatcttggaggtggcctatccgtcctgcgcggattctttgtcagtgtgcgtgccgcaactgctcgtgtgctcttgaacgtccaggtcaaatatctggcatgttacaataaaggacctctggtcaatgtgatccaagactacggcaatagaaactcttaccgcttggaaaagttcctcaagagcctccgcgttcgcatcactcatatttcccgcaagaacagccgcggtcagccccggcctcgcatcagacctgtctatggcctggctaaccgcggtgatggtggctcggcgcccaacccacccaaggttccccgccacggtgctggtccccaggatgtgcaattcttcctagccgaatccagccctcagcccgtcgccgtgcctggtgcgcctgagcccaagggaaagaagggaaagaaagctcccagggccggtcctgcggaagccggtcgctacattaccgttgcggacttcttcaaaaagggtccgtcgatattttttcctttaattttccttcggctcccttcctcctcgtgttgtgctgactttcctcttagagtataacatgactttgaatgcgaaccttccagtggtgaatgtcgggtctcgtgagagacctgtgtatcttcccgttgaggtctgcgaagtcgagcctggtcagccagctaagtccaagctttctggtgatcagacagccagtatgctccgcttcgccgttatgggccgaaagccgggtcagaacgctcagtcgattgtcaccaagggtgtgggtgtgctgggactaggcgagccattgaatcccacactggtaaacattccctcgctcccaaaatcttgtcaagctttctaactttccatttacagtctgctttcggtattaactcttccacccaactgatcacggttcctgggcgcgttctctccgccccaaatgtctactacaaagacggaaacaggaccaaggagatcaggactcaatatggcagctggaacatgcgccaaatccagttctccaaggctgcatccatgaaatcttggacttacctctacgttgatcaggagggctcccggccagttttccaaaacccagctcagctcaacgcgtctctggaaggcttcagaaagacactcagggatatgggaatggctgtggacccccacaagcttggcaaacgtgttgtcctgaccggcaagaacgacgctcacgatattcagcaagccgtcgtcgatctgcagaaacagcacaaccccatcttcattctgggtatactctacactaaagacactggtgtctacaactgtgtcaagcaagtctgcgacgtccgctgcggaattcgcaacgtgaacgttctcgcagagaagctcatcaactccaacgaccagtacaatgccaatgtgggcctgaaaatcaacctcaaactaggcggtgccaaccaggctcttcgcacccaggatctcggcataatctccgaaggcaaaacaatgctcgtcggcatcgatgtcacccacccttcgccgggctccgccagcacagcccccagtgtcgccggcatcgtcgcctccgtcgacgcaaccctcgcccagtggcctgccgagatccgtgtccaaggcgcccgccaggaaatggtcgccgacctcgaaaccctgctcgcctcgcgtctcctgcactggcgcaaactgaacagatccctcccagagaacatcatcgtctaccgcgacggcgtctcagaaggccagtacaacaaagtcatcgaggaggaactccccctcctccaggaagcatgcaagaagacgtacccagcagaccagaccaagaaaggcctcccacgcctggccatcgtcgtcgtcggaaagcgccacaacacccggttctacccaacaaccgagcaagactcgaaccgcgagaaccccatccccggaaccgtcgtcgaccgcggcgtctccgaggcccgcgactgggacttcttcctgcaggcgcactccgccctccagggcacagcccgtccagcccactacttcaccgtctgggatgagatcttctacccccgccacccagctaacagcaccgggcccggcgcagctgatgtcctccaggacctcactcacaagatgtgctacctgttcggccgtgccacgaaggcggttagcgtctgcccgccggcgtactatgccgatctggtgtgcacccgtgcccgctgcttcttgagtgacctgttcgaccctatgcccgttgatgcttccggtggtagcaccagtggcacggacggcgcgttggaaatgactcgcacgcgggatgtcgtgatccaccctaacattgcagagactatgttctacatctagtctgcttttgagaatctgcgttccgtcatctatctgctatctactatgcgttttgcgtatcttttgaattctgcttgactcgacttggataaatttggtggtggagagaattggaaatggaattgaaataatttgatggaggaatgaattatggatatcatttggacctggaagacctacttacattcgctcgctcatcgttggtctttggaaaataccgtttgggatattctgtctcgcttggcttcgatactggacactggagactgtttcttatcttagacagtaccttagctgtgagactcaattaaatcttgaacgatgacatcttttgtgatccctgggtaggtgtattatattgttctacgctattgaaagtaggaccaaggaatcggaagtataacaccataaattaagagattaacgaatcccgctctcatggaaataaacttgtacactaataacattttgagggcaaggtacagaaataaacaagaaggcaaaaggttgaatagtacacgcaggccaggcattccacactcgactccaactaacattgaatttccaagcgcgaaataaaaggaaagccttcagcctcgattgtcttttttttgtgattttgcagtttcgcggacaaatgtccaaaattaatgcgggtatcgatacatattgttcagaaaaagtcggccgttgctcgtcagaagacgccgctgacaaggatacacacgtagtatcgagctaagccctagaccagcgactagctcacttagttgttgtctccgtggttccagctgggctggttgtggccgagggggttgcgctgcgcagtggcattcctcctaaccggctcgggggatgcgtcgtcaaagttaccccagtgtggctccatcatcttattgtgcttgtcgtggttttgggtaggcttaggaggggtcggctcgtcgtagttatcccaatgggactccatcatcttgttgtgcgcgtgatgctgctgggtaggatgagggggggacggttcgtcatagttaccccagtgggactccatcgccttgttgtgcttgtcgtggttttgggtaggcttaggaggggtctgctcgtcgtagttatcccagtgggactccatcatcttattgtgcgcatcatgtctttgggtaggcttgttctccttgacgggcgattcgtccgtcaggtcgaattgcgaagcgaagttcttcttgcggttggcgacgtttccgcctgttggaaggggctcgtccttctgctcgcgctcggagagctggggctggccgttgtcgtcaaagaggcggttctcgtagaggcgcttgccgcgacccccgaatgagctgatgatccgcccctcgtccgcggattctgaatcggtcatgtcaaagtggcgatctgcgtcgcgacggggcttggccacgtcctgcttggtttggggggatccggcgccttcttcgtcatcgccaaagccaaagtggcgtacttcttgcccgcgtaggacgcgctggcccttcacaggggtctcaacgtcgttgaagtcccagtgggtttcgtgtttggtgttggcctgcctcacttctgctttggcctcgcgctccgagttgtctccgccgatctcgaagtggtcgtactttccggggacggctttgtagtaatggcggtgttcatcgacaggtccggtgcgcgagtcgggcacgtgatcatccttcacgaaaatatcgctgaagttgcgctcggcaggtcgcccagccgagggcgcaaagggagccacaggggcgcgaaccttcttggtaggggacagaagctcagtcaaagaacccgctccgtaggggtctggggtatatttcttggctgtggatggtctgctgggggtcttcgcgccgctttcgggctcagcgacctccttgactggcgagatgagctcggtcagggagtcggctgcgtaggggtccttgatgcggcgcttgccagaggatgaggggcggtgggggagatcggtatccaacttctgggaagaaggctgcgagggggtcccacgcgccgtctcggcgtctctgaggagacggagttggtcttttccatcacgaatgggccactggcgtccgcgcgctccaataacctcgatttgcttcagcaatgaggcctgatcccagtaaattcggatctgcttgatctgttgattggtgtcgaagtggacgatgtgaatctgcgggatgatgcattagctttgataagcgacgcgcgtcggggaatttaccgtgggaaaggtcgcgacacggtcggccaggaaattatcgtcgagtgaggggagataaaccccaccaccctcggtgaattcgagggttgtctccatgtcgagacatagcgagtctgatccttcaatggcgctgatgaccttgttcgatttcgtcttgaccaccttcgcgttcttcaatacatgagtgatcacgttgtcggacttctcgaacttcgtcgtggtaggaacatagatcaaggacacatcgtcggccaacttagcagccttggggttatccaggaaccgctggtattcggtcttgaagtaggacattgtcaaccgtatagggacagggggtttgaaagggggaagatattccagagaagatagctactctaggatactccagaagtaagctagacgatattgaagttacaaagaaactattttccaattgagaaggggaaagagagaaggggagaagggaaaggaagcgatgtcctacgatgcccaagcgcgggagtcccaacgtacattactcggcataaataatatacaggggaaacgccagaaccagttagtcatcggtaccttgcatatttagttaatgcagatataaaatgaagtgaaaatgcagtagaaaacacgctgaagtccctgaaatcttctggaaccgtctgaaaacacgccagtgtttcaccatacgggctaggcttggggcttggcctcgcgtctctccggtaactggagaatctggagaatacactttaaaggcttcaacctctacagggggatggattgcacaggggacatgcagcataatgtacattgtacatttcagaagtactggattgaaatgcccctccagtgggtgacacgatctctggcgagtcgggagtcatttcaacagtctgcaatgccgattattcaaatcagacactctcgagtagaagacatgattggtctttcattgaagtatagccaaagtcgaagtatggcatatgtaccgagtagggacttgtcaaactccagctcctgaccggccaattcatttttttcctgtaaggcagtaaagccctcctaagcacttgtcgtatctttgaggaacgatagatagcatggtaaattatcgtatgggcgaaaaaggtgggtatgtgttgcaatcgtgtctcattacaaaggtctgttgacggaaaccgcgttagaaaagatcccatgtactgggcgtggtcgaaggacttacccaagataatcctccttgatggtgccaatggcattgatagcagccacgtcgggcttgacaccgaggatcttcaaccgcaaactggttcctttctcaatcacttgatcggcatgatcagtgtattgcggcggcacggtgttaggctcccatttgatatcggagggaatgttctgattggttgtcagcagcgaaactcagagatccatggtcagatgaaacaaaacatacctttcgcgcaatgaagacagacaatgggcccgccagggtgaagatacccgtgggcttaacggaggtaacaatggcatcgacctaagctcagtcagcgggaagccaaaggccaaaaccttgtattccaagcgcataccgtctcgccacggaacggcttccagatgatcgcacgatatctgattgtgtattccgcctgtccgattccaggcatcacccgcccctcgccaatatcaaccatgtccatcacacagatcacaaagtgatcacctgtgcaccgtccctcttcctcttcgttgagtcggccgatgaggtactctcgcatgttgggtccgaaataggacgggtgcatagaaatcaccttggtctcttctttgaggaagaacatcgtcgcggttatggttgaatgaaaatgcgctaatgaattgcggagtggaaatattcaagtcgctttcgggacagtgatgctgtcaatcgaggtcgagggacggcgttttcgaccacgcgcgcatgacctgcaacggtaaagcacaaacaagatgtgggatgtggctgctagaaatgagcgaaatgagatccgagtacccgtgggagtggcagagattgtatctgccttggaacttgaacgaggaggcagatacgttgctgcaggcgcaagctttcctttcgtcaagagcatctcgtgggccaggtttgggtgggtggagtcacgtggtacgattcttgaacggtgagaagttgacttgagatttgcacattcaaaaatactgcaacttcaatttttttccggtatattagttaatggaatacgtagccaatattgcacttgatgatgatttagccatgacctggtggaggattagttcttatgtgaggaatgattggatgatctatagcagaccaaacaacatgtacagaagtaaatagtgaactttcctgacttcgctctcgattcagcttatgatatcatttttacgccgtatatagccttgaccggctagcgttgactagttattggttttcaaaaatcggcttggatgtataccgctagctatatatatcagtctactccaaactgctgtcgtcaatttcaatatttacattacaaccgagcgctaaattgacaatatggaaggcatactagatcttcatcctataaccctagggaccatgtaagaaaatacctaaacttgtaggaaaatagtctaaagcctcactggagtattatatactccgtagttaacgaccaatttaatgagatacgaaagagaatcccaattaaaaccactatgtatataatcaattacctgtccctaggtaatgtaggatctcgtggtgaaactataaatgtagatgatctgataggcttgtgcatggcgggttggtgtataccgttacgatgccaagaccaacgtcttctaagcacatgacgccagggccaggacgaagatcaattgcaccactcaacgctttccgataatgagaatgccacttgcctgatcccatcaccccgcaaaactcttcctctagaattccccatctttttgttcccaaaccggcaagatggcgcttaatcttgagaaacagttactcttcgtaagtatccgcatccaattcccagaacgactagagctgactgtgatttagtatggagcctaccatagcaatcccgtacatccgccctaccctcatctcgaataatatcaacgctcactaacagcgtaggtcaacgtcgcaatccacatcacctgcgtcccaatcctactgtttaccggcatcgtcctcgtacgtgcatctcggcattttacaaccgaacgagatattcccagtgtacaaaagtactaatagtgactttcaaggcctgcaactgcccacccctgttcaccctcccggacattatccgaatcgaatacctgcccgcgaatgccggcacaatcggcgctcttatttacgctactttttatatcctcctagagcccattgccggcggtctactcgcacccgccctgatctcggctgcatactacggaaactacttcctcggcacgtacggaagcaccgtgaactactgggccgggggcatccacgtcgtgtcatggctggcgcagtttgtcggacacggcgtgtttgagaagcgtgcgcctgccttgctggataaccttgttcaggctctcctgcttgcgccgctatttgtctggatggaggttctgttcttcttcggatatcgcccacagctcaaggagcggttcgaaaagggcgtggagctggagattctgaagttccggaagcaggggaagggcaagggcaaggcggagcagtaaatgcgggtgtgggtgcagcacgcagcaaggggaggtattgctcgccaagatcgagggccgtatgttctcgggttgtcgcggttggtgttggaagcttcagtggttccatgggcgcgttgattcatatgtcctgttattagcaagcgatttccggcgcatttttatgcttttgcgagtgtcatctcgcattgtctttggccaatggggatatgttgatccctttcccgtggagtggtcgttgctgttttggggccaatgtgtgattctattgtatggtagtatggcaatgccaagtcagtcgactgacttggaaacaagcaaataatactgcgtactccgtagataacaacatcagcatacaaagtatacaaaccgcccgtcttcggttgccgtgacgaaagccatgacataagcgattcacctgaccaggaattccgccgatccgagaagagaaaaaaacggaaggacacccgtggcacactcttccggtcggcaatgcaaatggaagcaactcattctgggcttgtataatattttgaaaaattgggagaatttgtagaaatcgaaatatagaaaagggaaaaaaatacatataacattgtaggactaagaaaagtcgtaggagatacaccgtggctacactagggccacctcggagggcccagggtccgaaacggtttagcgcgagtcctgagaatccaatcctccccccgacgacaaagctctccctcccgtccacaatccctctctcctctcccgttctcctctccccaattacatctctccctcagagaattcatcctctcatcctctgaaccccctttcacaatgttcagaaacgctctgcggtcgtccagccgctccgttgcggctgtttcggccactggccgcatcgcctcggtgagtctatcccatcccagccgccttcgtccatcgccagttcgacatccttcatctcaatcctgagctcgattgatcctcatacctcctcacacctcgacaataatacatcaacaatagctaggacgcattgtccttctctgggatggtcattaacaggtttttcgtcaattacaggtccgcgcggctgctgccggtcctctcaacggcgttcgctcgtacgcttccgaggccaaggctacccctactgaggtctcctccatccttgagcagcgcatccgtggtgtctctgaggaggctggtctcgctgagactggtcgtgtcctgtcggtcgggtacgtcaattctccctaggcggctgggggcgcgaagaaaaattcggtccccggttacaatgccattgaatccgccattatttctcaacattcgaaaaattaccgatacagaaactaattgaacttcaaacagtgatggtatcgcccgtgtccacggcatgaccaacgtccaggctgaggagctggttgagtacgtgaacccccaaagtcttggcattatgcctattcaaaaaactaacttatcttcaggttcgcctccggcgttaagggtatgtgcatgaacctcgaggctggccaggtcggtgtcgtgcttttcggttccgaccgtctcgtcaaggagggtgagactgtcaagcgtaccggcgagattgtaagcacttcaatccaacccctaggttcattcttatacttggacattgaatctatccacgtatggcaattctctaacacgatccccaggtcgatgtccccgtcggtcccgagcttctcggccgtgtcgtcgatggtctcggtaaccccattgatggcaagggtccccttggcaccaaggagactcgccgtgcccagcttaaggcccccggtattctgccccgtcagtccgtcagccagccagtgcagactggtttgaagtgtgtcgactccatggtgcccattggtcgtggtcagcgtgagttgatcattggtgatcgtcagaccggtaagaccgctgtcgctctcgacaccatgctcaaccagaagcgttggaacaacaagtccggctctaccgaggaggagaagctctactgtatctacgttgccgttggtcagaagcgttcgactgtcgctcagctcgtcaagacccttgaggagcaggatgccatgaagtactcgattatcgtcgctgccaccgcctccgaggccgcccccctgcagtacattgctcccttcactggctgcgccatgggtgagtggttccgtgacaacggccgccacgccgtcatcgtctacgatgatctgtccaagcaggccgttgcctaccgtcagatgtctctactgctccgtcgtccccccggacgtgaggcctaccccggtgacgttttctacctgcactctcgtctcctcgagcgtgccgccaagatgaacaagactcacggtgctggttccttgactgccctgcccatcattgagacccagggtggtgatgtgtccgcttacattcccaccaacgtcatttccatcactgacggtcagatcttcttggagtccgagctgttctacaagggtatccgtcccgccattaacgtcggtctgtccgtgtcccgtgtcggttccgccgcccaggtcaaggccatgaagcaggtcgccggttccctcaagctgttcttggctcagtaccgtgaggtcgctgccttcgctcagttcggttccgatcttgatgcctccaccaagcagacccttgcccgtggtgagcgtctgactgagctcctcaagcagaagcagtactcccccatgtccgttaccgacatggttcctctcatcttcgccggtgttaacggtctcctcgacaccatccccgtcgacaagatcctcacctgggagtctgacctccttgctcacctcaagagcacccaccccgagatccaggctaccattgagaaggagggccaggtctccaaggagactgaggccaccctcaagaagaccatcgctgccttcaacgccaccttcaacgcataagtgaagaaacaactcggatgatccctcgtggtcggctttgttttcttgactctatgtgtatagacaagatagcctgtacaattttgagcccattgtttttctgttcttcttggtgccggtgcctggcaggagatctcagtctgcccctggatgtagcgatgtaattatctgcatgatcctggggggcggaccaaggatttctcgtagtgctgttcgagcgagaactcaaatgactttggtctgccaaaatgtgattatatcctgtacgtttagattttatccgcgcatcgggggcgcgtgatgggtggacgaccgttctaattccgtctggtctccttatgctctccatgttggacctcaattattttcattttttcattgttatatcgtaattctagactgtagatttggtttgcacgactgctagacgtagtattccatcggatgtaccgggttggagatatgcgaaacatggcaacttcagtctagatacacgccaatcgaccgacggaactgaatataagcctatttttatgcccatttttacgacattctataccacggcatatcattgaaaagacacgacgacccggtagtagaggccgaaaccggcatccgatttgttatcgataagcgatcaagattttcccggagatcaccaagtcccccgcgtgcaagcaacttcgcttttctctgttactgattatatcgttattatcgctctatcgccgtcatgtctgcccctaccgataaacctccctcctcctgcaaggtgatgttgagcaagaatgttgccaaccatctcctcaccgaagtccacgagggccttaagaccctcgagaagccgcctcacttggtcggcctgctggccaataatgaccctgcagcgctgatgtacgcgcagatgacgcaaaagacctgcgaggagaagtgagtctctataatattctgattatccggctccaatggatccaatggcttctttggtgggggtagctagtatgattcatacatacccctccgccaacaaaaaaaaaaaaaaccaaaaaagcctagaacgaccctaaaagcacagccaacacctcaaaacacaaccagaaatccaattgaagcaaccgactaacgcaatgcctttcccagcggcttcaagtacaccatgcgcgaggtgtcccgcgacgatatcgaacaggccatcctgaacgcaaacaccgacaacgacgtcgacggcataatcgtctactacccgatcttcggcacccgtcaagaccagtacctgcagcagatcgtcgacgtgaccaaagacgtcgagggcctgagccaccgctacatcttcaacatgtaccagaacatccgcttcctggacggcgaggccaagcgccagaaatctatcctgccctgcacccccctggcgaatatcaagatcctcgagtacctcaacatctacaacacaatcctgccctacggcaaccgtctcttcggacacacgatctgtgttgtgaaccgctctgaggtcgtgggtcgtccgcttgctgctctgctggctaacgacggcgcttgtgtttactcggttgatattactggtgtgcagaagttcactcgtggcgagggattgcagaagaacacgcatgaggttgttgatcttgagggaaagactttgaaggatgttgtgccgctttgtgatgtggttatcactggtgttcccagtgaaaagtacaagttcgatacgagccttctgcgtgagggtgctgtttgtgtcaacttctcaagcgagaaggtatgtctttgtgtttttaagtctggttatgaggttgttgctgactgttctgatatagaacttcccctacgaggtccgagacaaggcctcgcttttcgttccctctattggaaaggttactattgttgttctgttgcggaacctgctggtatgttttatctctatacttcattcgcatgctcagtggtccttggtaacatctaacatgagaaattacagagactcatccagaacaagcgaatggacgatgtcaagcccgccgaggctacggaacgacctggcaccctcgaggcatcatcgtaggtcggtcaccaccggttgaaatttcaatctcgatggccatgcattgagctggccatttcgtaaaaaaattatagatattctgtttgttattagccatttcgattatactctgagacttatgtttcttcttttgtttcctgtgcttagatatccagtcgcattccatggttgaaacttatagagattggctctgttgcctttgtctattcttctaacaaggactgtttcttgtttaataccatagcttgttgtttacactctgactttgcataatacctcaatagaaaactgctggcgggctcgaaggatgatattaatatactaacaaattgccccgagaataattgggactggtaacactcaaacctgtaacgcgcaaagagccattcagttcaccttggcacaagcttaacgaacaaagacaagaacgatgacaagaactaacaggggaaaaaacacaagagaaaacgcaatcaggaaccaatagggcttcaacagaagaagccaccaaatgatgagatcgccccagtcactctcccaatctgcgaactcatcagccccagtcagaatataccttagcgactcaatcgctgacagttgactattatcactgatagcgaccttctggaggagttctgcaggaaacaaaggcgtttccggcacgagaatgacttgaacgtaagggcttatagcgctaggacccacgattccgatcatgcgccgtgggacctgaagcccaggtgccaggacgatgaggtggatacaacaggtgtaattcacacgccggtcgagtctctttgtctggatacagtagaaatagccatgtgaatactgttcggcggtgcgctctgtttcttttcctccagactcatccacggacggcgtagttgttacattggtcatctgttctatagtgactgaacaggcttccagtcccttgatttcaagggtctcggtggcatccacaagcgagacaatgtcttcgggggaaacccaggcaatgactactgggaactccgggagagctgaaatgatcggattgttagttcagtttctcactcaaacaccgggattcggcgcggcgagagcttaccacgaggtcgacacagagtagatacaatgtatcccatgttggtggtctttacgactgtggaagatagttgtgaaggagttttgatgattcgaacttgattgagagtcaaaccatacagtctaagagcaagtgagcagcaaggtgcaaagttgtccgaaatctaacatcattaatccccaggctctgacttggaaggttcgagtcaacccgaggtctctccaagttgggaaagtgcagtacagctccaggaagtgatccacgtgagctcaatagccctagctaggacatcacattctaacagatcaggctaagacacccagcatataatagtttttctctcatgtcgagtgaggtgcaggtgttgcatacgagattgctttcactgccggtcgatagtgatcaagtcacgtacactgttgggatgcttctgattaactatgcctagtgaaaagaaaaacacagaagaccgacctcttccttgctcatttgaacatgtgatacccatgtactctcctcaatctctcttagagaatgaactggctttgcagtttgcaataaccctgaaaacataatatctgatagtaattgataggcaaccttcctctagccaaacttcttctcattttccttcgctgccaatctcaaaacatcaatctcgctggcaacccagcgacggaaaggctctgggtggaatacaccatctaccgagaaccaagttgtgaagggcgcctcacaccgcttgtcctggagaaccttgccagaggcggacttataaatgacatgcaacttgtagagcttggagaactttttggttgacgatgacacagatatctataaacaagtcctgttagttacctggccaaaaaaagaatatcagaacgaagactaattgacataccgtctccccagtcttcctcttcccggaatatacctcgccagcctcgacggcccaaatccagtatgtgagaatggcgttcaagaagaagtatgtccctactgccgcgataatccagggcgaggtagttgcttcccagccaagcctgcggtctgcatagaaagtaaaccctgcaattgcgacagcactatatccaagcaagaagcgaatgttcgtcttcgagtagtccggtgtaaaagcgtatggcgcgggaaggttggtgagataaggaagcagagcatcgtcgctcgtagatttgagatctgttgctcacgccgttagtgttgttgctgtatagagtatagcgggattacgtaccattggtcgagtagaccggcaccttgctggaagccataatatattcgagaatagatgcgagtaaagagctttttaaaaccaaaagaccgagtgtggtttagcagactgttgtttaccgcaggacaaagatgcggcgtggcccttgggagaaagctggagctaacgcgggccaatgacatccctctccgcctggcaacctctccttcgcggccccttcaactttccatcccccacctgcagccaccactaatttattgttggttcgaaggaggcacttcttcgattcttattctgcctcaacatggcaattcaaggggctgatcagaccatccttagggatccggcattattgtgagagaacatgattcgatcaagcggaagttggactgaccatttgcttatagctattggattctatttcccatttcaattgttatggtatgacctgcactcggtgcttgaagctaaatattcgcgatgcctctgagactgaaactaacctctcttattggatagatactgactggaatccttcgccactatgctacggtcctcatgaacacgaccccaaaggcgccatccactcttgccgagtctcgcgagcgccttgctcttctccgcggtgtgaatctccgcaacaatgcctgctccgtgctcgaccgcgagtcctttgagatgcgcaagaactacatggttactggattccgcaatggcgcatttctcaaggatcccaataatcgcggccaaccgcccgcgaaccccatgactgatcctgcgggcatggaagctatgatgggaatgcttaagggaaacatgatgatgatgatcccgcaaaccctgatcatgagttggatcaatgccttcttttctggctttgtcatctgtatgttgcaatttgatataaaacatgagcaacgagcttacaaattctgaagtgaaattgcccttcccgcttactatccggttcaagtcgatgctgcagtctggtgtcatgactcgcgacctcgatgtgcaatgggtctccagtctttcatggtacttcctcaacttgatgggccttcagtccgtttttggattcatcctcggcagtgataacggtatgcatcaatctgaccttcccaataagagttctcactaatatttatagctgccaatcaaatggcccagcagatgggtatggctaaccctgccgcaatggtcaacccgctccagcccggccaggatcccgacaagttgtatctgaacgaagcggagaacctggaggtgatggagcacttctgcattctcgatggagtggaagagagaatcttgcaaaattttgctcccgcagggatctaatttccgttttgatgtcccatgtgatgtctagtgttggtgtatatacctgtcttgaggtcatcgctggttttggatagcatacagaatagaatgtgccatctttgtaaacaagccgtaatctcgtgaccacatgatttactcgtgtcttctcgaatgatttatattgctcaatttccatgactcgtacttcataactaatctcaatcactcctggtggtaattaataacatcgttcagaatccagacttccccattattgaccttctctgcaattgaatcaacttcaatattgccaggttggatctatagacagtcagttaccataccaatgacttgtaggggataaaacctacaaagatcttatcaccctccttcgtccatttcaacttctcccctgcaagactctcaacttcttccccaactctccaaggactagccgggatgagatgggcctctacgaatcgctgtagattccgtttcgcccggtcttgaccatcctggccctcatatgcatttacctccccgaacttcttgtaatcctctggattctcccagggcttccgtggaagagcctggattgcactgttgcgtggtgctagaactgttatgttcttggacgcatcgttaaggcggctggcgatgggatcaaagtcacgggtcaaccgcgcaaagatattgatgcccttggtcttgggcaggacatctgagatgacagggctagcgctgtctttcgaggtcaaatcctcattcggaaccgtcttctgtggctggacaacaccagggagaatcttatccattatggatcggtgctcttggtgctcgagagctagtggctgttgacgcgaagggaagggagatgataggccccaaagtgcagatgcagatgtagcgagaagaaaagtaaataaaatggatgttagtcgattcgatttcatgctgcgggttggagccatcttgctgccaatgatgctgggcagcgaagcaggtctacaaccatgacgcaacaggcagtggcacgtgatgtggagagataacagaatcacctgatccttatcgataagggcatccggccacaagaaattggccgatgtgatcttgatctttccccccgcaatctacacctgggtctcccaattgatcaattggtatcatgtcggctttgcagacctttatgctggtcgtggaccacgacaaagaagaagccaagcgcattgccgagggaagcgcgcatggtatgctaattcgccccgcactcgagcccacttcaaatcgttgcattactaacggaagcgatagatattgagattaaaaaagtgactttgcttgatactgtccaatctctcggcgaatatattaacgacgaagacccgatcttacgtggaaaagcgatttccttccttacggccattatccaagccctctcgccgaaatacctctcgagacaacagattcaagtcctgactacattcttctgtgatagaattgaggatggaggtgctgttgatgggctgcaggccctgcagggcttggaccgttttaacaagtttttggctacccaagtagcgcaagcgtaggtgctatacttttacatccctgtattcgccggggataaagcttaactcaagatgacccagtgctgatttattgatatagacttttttccaactttcaagatctccagtctcggtctcaaacacaacgattccatgtctatgaattgcttaatgacttgatgtcaaaccaccgcggagctatgcgtgatatgggagatatctcgcttctaggtgttgttgatattatgacgggagagaaagacccgagaaatttgatgattgtattctcgatcctgaaagtggtcatggtggaatgggacatttcgaaccacgttgaggtatgtgtaatttcccaagctcggcgatcccgctaacactagacagactctcttcgactcggtatataactacttcccaatcacattccgacctccgcccaacgacccttatggaatcaccgcacaggatctgaagggtcgtcttcaagagtgtatctcttcgacaaggcattttgcgccccactctatccccgccttattggacaagcttgattctacttctcctaatgtaaaggtaaaattgctcaacactccgtgattcgaaagccgtctaataaatctatagaaagatgcacttaatgcattgatcgcgtgtatccatttatacgaccccgacacagtgtccaggtattccattaccatatggggagtcctcaagtttgagattctcaatgcccaagaggagttcttatccgaagcctccctcgaggctctgcaagcaattgcccaacggctatccgaaggagttaccgaagtgtcgcaagaattgcctcttgcaaagtaccttcagccaatcaccaaggagtgcaatgagcaactccgggagccccaaaacaagaaggccaatccggcccaatcgatcctcagctgtgtgtctgctgcttcgcccgtttcctttgtccttgttgtacaaacagtcgtacctccgattttcacactttaccaagaagcagacggaatcgtcaaacaaagagcgcttctcgaaactttgaatgtcttgttcgattctgctacaaccgtgtttggacaatggaccacccgagggggtgaggcggctatcgaaaacccgctactcgaatttaaagaccaattctcagacctttttggtcaggtattgatgggtgcagcaaaggaagaggtttccttccgggtgactgccttgaaaggcttcttgcgtctgtcgactttgcgtgattacttccaggagaatgagattgggcttttcgtacaataccttgacgaaatccttctcaaggaggagtccgtgggccgggatgatctcaagaaagaggcaattgctgcccttgctgagatttccaagcacaagccccgcctgattgtggatatcactttccctgcatttgtggcaactctgccagaggaagatgaagggtcggatgcccggtatctgccgacactcgagacccttgcccagatcagcgtcgagagggacatcttcgagacacttttccgtcgtcttttcagcaaactgtccgttctgctgcaaaaggaggaacccgggtcagttgcttacccacgtgcgatcctcgccaccttgctttatgttatgcaacagagaaacatggaacaagaccagagtgtggatttgtacttcgacaaggttgtggttggactttgccgcgatgtcgcagcatcggcgtctggcaagaccaagaatcggattctcaatgatcctaccgtgcttgacactttgggtcgactctgtaatctccttgtgcggtctgtttccattcagaaacaggagcaagttgccgaaaacgtctacagcctcttctctgcagctggagatttcgtgcctcttccgtttactcagactagagaagccgatcgagaacgtacgatcattatctcgacatacctgctcgcgggattatccaaggactatggtaacaagatcccgcacaccgacccagacatggcggggttgctgttggatctgatctatcgttgtgtcttgagcaccgaaccagcaacacatcaagcctacctgcgccacctggccttgctcgtcaacaagttcctgtcgaagcaggatgtgccaatcgccgagagactcattgattctctcctcgaaggcgagaacaccgaattacagagcctcagtcctcctatcattcgcaccatcttctggctatctaaagccttgatccttcgcttagcccccgcaacaactcacatcctgacctccctcctcgctctcctctcctccccagaccaagaaaccagcgcgacggcagcacaaggcttctccataattctaggcgaagacgatatcatctccgcaaccaatggcgctacaatccgcctcctgtgcagacagcgcctcttcacaacagtcatccctttgatctccactcgcattcgcgaggtgaacatcgccggcacagatggctcccaccccaccccaaaagcgcccgaccatattaaaccagcgcacctaaccgccctcgcgggtatcctctccaccatccccacggccctagtcatgcctgaactccccacccttctccccctcctcctgcaatccctcgacctccagaccgccgactcggtcgctgtccgcacagcaacgctcgacaccctcgccgtcatcatccgtgacaacggcgtcaccgtcatcgaccggtgcggccacgtccagagtcttgtcacgagactcctcaaaacaacatctacaaatatcggccctggtgcggttaacagcccccgtctccgcgccgatgctttgaaatgtctcaatctcctcgctacgcaccaggtgcccggcgctgcatctaatgctccgccgggtatctcgcctctattacctgtcaagaatcaggttctgaggtccttgcgagccgttcttgacgaccctaagcgtaatgtacggaaggcggcggttgatgcccgagccgcttggctgcgttgtgtggatgatgccccggacgaggaagaatgattatttttgggttaatggaaaaatatactcgcattaaatttagaggttgtttattatcatatattgagcatagatggacatcggggtttccagttctcgttggtgtaatcgcagaaggaattcgagtgcagtataaaattgtgacacctctgctgtgactgtaatgtgccagatccgaagagtaagagtacatctaattcaaaccaactaagactgagagaagaaggagagagcaagttgagagtgaatatcagacatctcgcttagctagtaaacattctatggacaaggaaaatagcaaacagggagcaagcaagcagaacaatagctgagtcaggacagctataatagtaattgtaaaccccaggagaatgataatactttctgagaacatttatatatcaaattcggaaatgacttgactatatcttcaaagaaagagctctatatatgattgacctgcacccacagcgtctagtctcacttagaaatgcctcgcgcgttccattagatagaaatatatcaagtgaccacaatctccggtatataaagtcctcgtcaactaccttccaagcttccatcacttcccagtctacaaaacagtcctggggagcatataagaactgcatcatttcaatatatcaacaatcatgatcaatatatcctgtttttctctgtgggcttctctgtcctgtaagtttggttcccttttatttcaatctcttttttatttgtctctttctaacttctagccttagtgcccctccagcactgcgagggcgtagaatccatcgggcatctctctcttgaaatcccgaatgggtggcgttcaatgcgcgatgggtcatccagctcccggtatagcagcgaaaatatacccacccacaaaaactttaatgatcactatacctccaaccaaccgcgattctgcgccgagcgaatttattcttgaggatgtggctgagctcgtccgaaggaactgccggcgcagatggataccaggctcgctgggcatccaaggttgtcccctacgtctatgggtttgatgtagccaagtcatcgctgaaatggttcaatgaggtgctgaagaaatccatcgaactcttcatcaacgctgcatacggggatcggctcaaggtatacacgcgggtccgcgctgctgctcttcgcgaaaattggaacacgcttaagtctatgccgatgctgacctacccgccgtttccactctacgattgctgttggcacacctaggcgaagagattcgagagaatggaagaaatccctggcattgacgacctccgtgtctaaattcaccatcgaagacaagagcgaggctggtctcacattaccgcagagggccattacttcaccgataagttcgaaatacctggccttatgcacgagaacgacctacaaatctccttgataccacaaatacgaaagaggataaggacgtgagaagagcagaaaacgatctgcaggaaaaccaaaccaaattcaagggtattccgttttcctggaagtcgtcggcatggcgaatctcgccctggtcttaagggatactcctatcattgggagcgttaacggaaaaccgaaaaagccttcaaccattgcctccgaaatcgtgggtggcgagctttaagaatacctccagcatattgaaaatcctattacaaagaaagtcttccggaaaacaggtgcattcctcctcgtcagaggcgcacaaaacagaggttttccgaatcggattctgttaatatggaaccatcacaagcattgcaagaaccataagccgaagcacgggacctccaacagacccgacttttcattggcagtgaatcaaaattgaattccgatgtccgattttgggggaactgttagatcggatcatcagagacccgcgatgctcgctctaccgcattctccaccgcggtcgaagagtctcaactcttcacgccagctgagcgaagaatgggagccgggagccacgggccccgaaaacatccccgacgtcatagggcttcaagacgcaaatggcaaaaccaaactcaaggtggttggagagttaaagataccctgggtcgatgaggatcctctagtgtccactgctaagcaaagtgagcttcgcgcaacctctgcgggatatgcagaaggagttgaccaccccgaacagctttactaccgcatccttgacgccgtccccaggatgccagccaggggcacctacaccccttttcaattcgcagggggcctgttacccacgtgactacatagctatagccccgctactatcatagacaatacatcatctatcttcccctgagctaccagcgtgacagggcctccaggatcatgtttcttcccctgagctactggtggatcatgaaccctcatgatggcaatgcgaagatatgttgggtggccagcaaggcggtcacccagtggagccagatcccactattagatagaccagatagttccgtccttcctcccttgtcctctcctccttgtccatcatcagcaagagctgccggagcatgtcacatgagatcaatctccagcaggaggtgaaaggtactgcacgtgcccgtacagcaacttcattcggaagcggagctggtactaccactagccagtcctacaccccacgtgtgaagcgcgaaggaactacgtcgtcgtccggactgtcagccatagaatgggagaccctgatgaaggagggccgatggttctactgcaaagagaaaggacacatgacgtttgaatgtcctaagaagaaggcgaacgtagcccaacaaaatctactcctgtcttttttcttacgatactatccatctagtagatctctattgatatatgcttacctctctggatcaatcgatatcggtcagaaactaggattgaaaagccggagaggcaaaacaacagggccaatcgctactaggtcaacacacgcattgagccacttcaccttcgagatctataccaaatgagttgcgagatggaatccttcctgataaagtgggaggtaaatgtgttggatctgtacataatattaatacctacctaactacatcactggctacatctgggtacttcttataacaatcctggctgctccgtcaacacatttatggtgtaaacttcactacctcagcccagtttatcttctataaaacggactggagtactcaataatactgtagctaaaaccatagggccaaactacacagctccataaagtaatcaaacattgtttttttaatttttttggtgtcttaaaatgcagtatcaatggaaaggatacaatctgtcccgtttccactccaacccccgagattcatcttcatcactgtctcatcaccacttgtgctttcccttcaattcagttggctgattccagggaaccatttgtttgcccaaggtggatgacgccttgaccatacctgtaccaccctggctgcgaccagtcgatgtgttagcacgcttgtcaagactcgcaggacctctgttccagtacccgacagcatcgatcttctgcaccacggttttggcaagttgtaacattgctccaattcctgaatggccgacttcgcctccgagggtgctcagcttctggtttatatcagagggaaggaccctcctgacatctgcaccgagaagatctgttgcacaccaggactcgttgcgatcaccgggttcaaggaaggaatttgatttcatgatgtcgtccactttgctgctgacaatcgaggcctgccaccactgctttccatccttgaccatcttctcaagcgaggcgttttgcaaaaccgtgatactaggatcaaagacggatggggtggcgaggagttcttggctttcgctgatttggagaaacaagcctttgctctttttcgagcgataagggtgacggctccatcgttccatgaacaccttctcaattctgatctttgacgccggaggagcacggaccagcatacgaagatgtttattgtttggctctacccgaatgcttttcgccatcattcgtgcagcttcgtcaagctccggatcagcccccgtaatgtattcgatgtaaccatgtaccctagcagctgcatcccagacttgtgaagggcaactcaagtgcacagtgcctagggagacctcgggatagcggatcatagcgtgtccatattcattgactgaaataacaatggttctgttcggaccaacgcggcaccagaattcgtactttacgcctcggtggctgtactttcggtcgaacagacgagattggttgacctccaaatcgatgaggtagtcaatatcggcaggagatgtagtcaagcgctcgaagaatgagattggaggcggcgtcaagttattcttagagaagaacagctggtgaacctccctatagctcatctccctctctttggttgaagccggtaggctgggcatgaacataagcccgaactggatttcaaggctcattgctccagggaagctgcgaactgcatcaaggattggttgaagaaaacgaaacaaattctctgttgattcatgcatctgcttcttttctcttgatttcgcagccatcttcatggacaaagcagtgcttttttgtggcagtgcttcttttgcttttgatcctgttcttcgctgccagttattagcaatgggggcttgaacgttttctccgttctctgcattggttgtgctgttttcattcccctccccggcattagcagtgtggacttcaatatctgcccttcccacggcattaatcacttcatccacccattgaaaggatttgccgcaaggccgctgatgatacattgacctctggaattctcttgtctcagtttcatccgagacagcaagcgtttcaatcacttttgcttccgcatattgctcaccatcttcagagttggattgcaaaagattaggcaagcgaggataaagcatctgaggtgagatatcaatgaggtccgggcaaagagatggcacattctcaacccactgaccaacgtgttgacgttgctggatatcaccgtgcggagcactgccacccgagctaaaagacagagctcgaggtacagggtcacaaaggctagcatcaagaggtatcgcaatctcctcaatgctgggaattcttggagtagaattttccttgatttgctggagcaaatattccagtgctacctcatcggccttgctgcggaatccaggggcctgttcatgttcctttccgtcgtccgatgcggcgctcttatgatcagagccagaaacttccaaatcaggcaatggcgcacttgtagcgagccctagttggacaggctcactagtaaaagaggctggagtcgtcgcacggagcagcatcggatctttatttaggtcgggataaagagagaaactctcagttagctgaggctgcatagctgtatcctcgatattgggcatatcgaaaatatcaccagtttcagtaaaattgcgagccttgacatgctgagcatatgtagattgctccggaccacttgatcggactgtggctagcggatcgaacgcaacaatatgttgtaagccactgttgagactgctcacttcacaatcaagatcgatgagggggcttgtgttctccttttctctttcgctgcgatccagctgggtggatgtggtacttggctgcttttgatcccttatcgttggattgttggacacttcgtctattccagtttccctcgtgatcttggtcttctcaagaattagctttatctctcccatcactgaatcaacacttcgcccttgagcctttgtattcacctgtaaattcactggctcgagtgtgccgaaaagctggcccttcttgactcttggagaacgaattggtcggctcagagggctatttagcttctcttctcgattagcgggagagatagccaaatcatgggacgtttcccccggttgtttgggtgctgtgcccggatgagtggataggactgggcgacgaggggtggcatttgagtctgattccctagtagagatagaagccacaggaccggttgcctcagacattgtttccggttgtttggaaactgcatttgaagcagtaaagtcagctgcgctgcggactatactcgccagtcctttttgttgagggactgagatagacgaaccggctacttgttgctcccttattctctctctgtagctgagtctgccaaacagagagatatttgggctatgaggagtgtctggcttttcttgttgagactggttaatgggtacagttccatcttgtagcataatcacgcgtcctttgacgccagcgggattgggcttgaatggaacggactgtctcttctcccgtggggcggaaacgctgggcgcaggttggagcttggatttaacaagcgtaggggaggtcgtatcatcttccagtgatgctcttgtatggatgttgcttgccataggccgtttggtgacaccccgagagatccatttgtcgacgtcttttgccttaccagtcgagagatacgggtgcttagtgtcattcctctcataaagggcctcacctttgggcgcgatatgttgatcaatatcccccagaaagggatcgtttctcgggccgatctctggaaaatgataatcttcccagtctctaataatgctcgctttctgagccacttgcggtggctgacgaagtttgcgaagtggacaatattggttagctgactcgtcgaattcgcagacgaccagagtcattatctttgggagacgaagagaggcatttaagtcgatcaaaatacgccacaaggcagtggtactgatctgtgcatatgtcatgatgcgaaaggtagcgtcctcctgttgtggagtaaagacgatcagtcctcggtttgtgttctcaatgagatcctagaaagtattaacatacaggacttcgaaacaaggactcgggactgtaccaaacattcttcgaggcagtcgagtatatccattgcctcatcaatgttgttcatgtattgtgcagagatacggagccctcgggctccctccactgtgatttgtgttttcgtcattttggaaatgcgaagtagaagagcgtccgagtcatgagagatggggcccgttcccatctgcgagggataccagaatttgacaatgagtccatcgctagtgggttgtgccggggcaatgtcctctactagggtttccgtctctgggagcgcatcgctttcgtggctaggaaagggattggggtcgaagaaggtagagattggaagctgacgaattctcgtcgtcttgggtgaagcagatattaggtcaatataacttagaaattggggaggaatcaagacatacctcgagcagatcatcattgcgatgctcttcaatgtaattcgcaagcagcgatgtgattttgacatcaaattcctcattgaattgacccgtaacaaccaagatctagacacaattagcaaagtcatagcaaatagtacaaataaatagtacagaaaaacctacatgtttatcacgttgatattcgaccttgatcgaagcaccgggattcaatgctctatgagaagtcagttttgatcaagataatatacatgaatagtatgcgtacttgagtttgtctcggatttctgggatctatatcgagtccggtcagtcctagtcatacagaatgatgatcatgagatgttaaagtgtagacttactccttggtcctccagtgaccacattgaagtcaaatgaagtgtccggctattagccattttggacggtgtttgagagatatgcggagttgaatgtattgacgtgggatggatgtgaagcgattggagaccgacgtcaggtgaacggatccaatgacccggagacggaaggttttgggccttcaatctatttgaagacgttaattgggttgaaaggggaatgaaagaagcaacccagcaagcagtgggttgattggacccaagagaagacaatcaattaagtaagaggtaggtgaaggcaagtcgagtagagaagaacaagatgagcctcacctagataatcgatttgatagaacaggctgtcatgaacggtgcacatgagatgaagataacggacgaaagacgaggaagagagaagagagaggaagatgatgagagtcaaatgaatatgatttctattattcagcgacgatggaaggaacaaccgcgtatatcaaacttggaagtcagtagcaagtgacggaatgtgaacgcgcgcagtgctatcttgtatccaggacgatgagattggagtatagcaattcaggaatatgcggagtgaatacatagggcaagttaagtaaagttgaaagagtataaatttctgagtcaagcgtaataaaatgcccataacatctaggcagaaaggaaatatgcagccactctttaaaagccctttgaacacaagcaagaaacaagacttgccatgttcaccacggtgtaatcatgtccaggtaaaaatatgcaggtcgtcaaacgccatatctaacaagggggtaacagtacaacaggaaaagggtgaaaatgcagagtaagaatacaggaatacaaaaatcgaagggcacacgaccggaattgaactctgccacgggtatctgctgcaaattgaaatgaaacgccatgcaccggccaagaatggtctatgagaaatgaacaagagtggtaggatggttgtcaagacgggagttgggacgggaaaagtattgtccggcatcaattcggtggtagattttgaggaatctgagcagtaaacagagagaagagggggtggagagagatacttcgcatgattgaggtctggggttgacacaaacaagagacaacacgaattattcgccgctttgttcgctgctttgtcgacttgcattgagccggattgcccatttcatttctgtctcggtctccttgagctgagcaagaaccccagcgaccatattattgctggccttggccgactcaattgtctcgcggaagtcgttatccttcaattccttatatgcggagtgttgggcgagcagcttgtcataagattccttgagggagtcgaattccctgttcttctgatctgcaagaacctccagcctctcggtggagagtatatgtgtcttctgcgcgttggcgagagtcgtgaactcggcccatatggcattaatgcgttttgcaaactccgccttgtcgcgtttcaaagtgccggacaatacatcgtactgtgtctcgtagtgtttggcgatctctagtgaccgggcttgttctcgattgtgattctcgcgctcctcctgcatagtatggttggtctggtttgagttcatttccgcgtcctgacgcttggtgcgctcgtgctgcagctctattctcatttcctccagcttccggtctttccgtgcaattgagttgaggttggtctcgttgacttgctcgaggtttcgtagacgctcgttcatgttttgctgctggatcttgtaggcctcattggttctctggtactcctccgagcgggacttgtagagtgtgcattcacgcgttaaccgtgctatttcttcctggagattgtggatcacacgtccggatttccctgtcgctgcatggccaaccgctgaccattctgatgtgtgggaatcgccattgctcgtgtcgacggaggtagcggatgggtttggagggttcgaatgagacgagagggattggttatagtcacctgcagggtggagattgtaagcttggaaggtagagggagtgggtttggaatcaccaaccattctggccttcggtggctggttcgtcgtcgaggagtccgttatgctggtgcatattcaattgcgtgtccacatgcgggagattgacttgtggcgcttctgcacggataggggggtcagcagcaatcggcatgagatttttgctagggctgagacgcttcatgacccgtttgaagccccccatggtgaccacccgcgcctgtcatgaggaaccagatgggaagagcaagatgggagcaaaaagtagtgagcctgtgaagggaaaggcgcataccagtattagaagtcaattgagcaagatgtgaggtcgttgtcttatggtgttgcttattcatctagacatcgcaaggagtgcctctgatcgataaaggcgctgtctcatgagatcttcaaagatcatcaaagatcactaaaacaaatgatctcagcagaataatccaaaacaatgaagtagcggtaaagggttgaagaagtgggagatcagtcgatcatcgttctttgtgttccaactccgcgtccgtcagggagcgccacggcgctagcggcgagcgacaggtcttgttttcttttctttgctttttcttgcctttctttttgtttgtgacgcattgaatatgctaaatgtgaattgattacttcctcaatgccttaggccacctatatatcaacgatatctgatatccaggggtattttatgtacaggaagttataccattttgttttcgaactccaccaaaacaccgaagataagaccgacaacgccaaaacagatgattgacctagacaaggcaggccaaaagaccggcaatacccatcaccaattgcacggagtattgtgggatagaagcagcaccagtctgcacgcttccggttgaggatgcttttttaccatcgacaacctcggtgctggtagccatcggcttatcggttgagctgacgtgagaagagctagaagggctgcctgatgagttgacagcagagttgatgagggccttgctggcagtgctagtcattgtggtgtgggttccatgcgttgtttcggtagtaccagtggtctgggtgttaggggcatcagtggtctgggcagtggtaccagtactagtgccagtagtgttttcggtgccagtggtggtgccagaagtaccagtggaggtatcagtagcaccagtagaggtaccggtggctgcagcagtagaagtagcagtgccagtttcggtggtatccttagcctcgggaatatcggccgcgggcttgccggccgacttaagcagagcggtatagttagtctggtctttctgcaagatttggaaggcataggtgtcgcccgatttgacatcgttgtcaggagtccaggtgaaggtgccgccctttccatcggtagtgattggcttgacatcctgcagatcgcccgaggaaccttggcggaggaggatggtcacaggctaaacggggtcagatttgttatgagacattggaaaagatgcgtattacctgaccaggagtcgcaccagtccatgtgagggtgaccggcttgccaggttggagaggctccttgggccaggaagtgaaggatagagggtcggcagcgagaccaagggacacgaaggaagccgtcacggcaataacacccttggagaaatacattgtgataaaagaaagtcaatagttggttggactttaaggaaagtaaggtagttagaagattgtgttgtattcgtgacctgggtgagccggtgacggagaacgcgatacaacttcaagaactggcgcatcgcgattcttaactggcggcaagaattgcccagatcccctccagccccgtaggagtgagctcgaaagtcgcctgttggtattccgctgagaccccaggggcgttttggagaatgttgcattccgatagccctaacagcgaagcatcaatacgttacctaaggaagcatgtctctaccttggctggggaatgcctactagtaagaattggaaattctcgagacgaagatagttcaaaacttgcctaggggagattgatcagtcattatggtgggagggctatcctgtatctttgatcgtactaactaggtggccgcgagatggcttcatttttctaatagttgccgaaagtccacaagaatggttcgaccgtacaatgaaagactcataactcatcgatgagaagacccaagtatggtagcccaatagcacgactcctcgcgacatgctggaatgctatccctttccgggttgttttggtggggatcagtctatagggctgcggcgaacatcaagatcatttctggtgtctataaagcatttcttaggtcttgttatactatggatctcataccaaggggtgccatatggtgtggtgcaatctaaggctggggtagcttgatcgccatctatacagcacgaggaataccaagtatttccccagccttccaacccaatgacccagttctagagatattgcaaggcctaaactcatatgggataggaaataagattagcaataacaataatggtacggggttgaatcgagttgatagagtaatgtatacaaccgtgctgcggaactcaagaatatatctctcatacgtgcaacatatgctatgtctcagtgccactctagcctagcctatactagtggttacagagcaataatgggcccaaaatatgtcaagtacgttggctttcttcaaattgccagttgaagttccagtcttgtgatcattaccgaagcatataccttcaagcgttggtcagtctaggtttagacttgcagcaagggatctgttgctagacgatcatttctcttccaggcagggaactacaactataccccgcaatctaagcccttgagcagagttcattgttaaacaaattgaattggtatacgctgatatatgaacctcagaactcccacaaatcccgcatgaaacaccctggaccagagtccacaccaccatcttcctctagtagacgatctgtgaagatacgcttgggaatcatatactcgacgacaggaatcttcttgagatttctctcttccactccaaggtctgcagtcaccatgcccgcgtacgtgtgatcaaggaaatcctccagactgtatgattgctttgtgaactgctcggaaatgatccgtgcaatggccgcaacgttggggtggaagtgagattggagcgtctcgatctcccaaagactgctctcaatggcgttggtcatgttggggtcgggctcgtttggatcgaacggatcgtccatgccttctttttccacctccgcaaggagatccttatcccgaatagatcggtgcatcatgaatgtggtcgtggggtgttccttgaaaaagttgtacatgaacggaacaatcaccacaatggcggagggaggggcattcaatgcaagacgagcgagacgcttgatgaagctggcgactaatgtggacggaagatgggttgaggacaagaaggtgttcagcagtcggaagaatcgtgatctgtgcttcgagtgcagcagctcggaatcgaggagagagtacagcttggcgtagaattgagggtagtccaggttcttttcctggatcaggtagaagagaccggaaagtgcgaggagggatgtcgcaccaccgacattgtatgagtcggtcaagaagtccatcagcagttccggtcggttgaaccaaggttcgatgttatgcaccatcatacgtaggaggtttttgcgctgcgattgcgagaggttgtttcgtagaatggccagccatgcctcctgcgcctgcttcctgtgggagtttgccgaaactaggcgcttattcttggtatctcgtttcgcgtagaagttttcgaacttgtgttccggtccaggaacctcgtcgcaggcctgaaggatcttaatcaggatttcaaggacttcgggggatcgtttcgtagaggcataatcactgatacaagttagcccaagactcgactgcgaagaatatatacatacgccatctgtgtgaaagtgtgatatctcacatcctcgtactccttcacaaacttggtgatggcttcggactgcagatcctggccgttgtgggcctcaatgatggccgcaaagatatctttgaagaaacccgtcgaccaaacattattctcagcacctgggatatgggcgagacgttccttgacaatgcgcatgctcagtgccagagcagcaatctagatcatcagtaatagtaaccccgccagatcagagcacacatacctgggaggaagcatctgcctcgcgcataatagccacaagagcattctgataatcaaggcaacgctccttcaaccatgccacaactattttctcgttctcggccgcacggctcgactcggtcaaatttcctccggcgatcaatcgactgaacacacggcaaagagagacggccacagccatctctggtttctcggcgttgttctcgacattgagcatggagagaagggtcgcaatattgttgtagccctttcgcgactccgcaatttgattctctagctcttgaatagtagacagtttctcggcgaaattgtcctcggcgacagcgcggcgcttggaggatgggccgctggcatttttgccgctcttgcgctttttagagctcgaatccgtaacaagtgcaggcattttgggcaggcgtcttgtaatgccgtgaatagtttatctgcaacttttttttatcgttcagaccatctcggatgctggtttttccgaggaacggaactatcgcccgaaacggctagcgtcttcacctcctagccatcccgaacctcaagtctcctcaattccgttcacccaccccatagaccaagattcttccatctgcaacaatggcttcgcgtcttgctaagagcgccattggtacgctttttacgaacctcgaccgtctgatcgactcaatgccttcagttactaacgcaccctaggcgcatcccgacttcggccggctctttccgtccgtggtgtccctgccgtcactgccaacctgacctcctctcgtcaggcctccaacgttcccgccgaggagcccgcgaagaaggcgcagtctattctgaatgccatccccggcaactccctgatcagcaagaccgccaccttgtctgccgtcgccggtctgtccatcgccgccatcagcaacgagctgtacgtcatgaacgaggagaccgtcgctgctttctgtttgctttctgtcttcaccgcagtcggcaagtacggtggtcccgcttaccgcgagtgggccgagggtcaggtccagaagcacaaggacatcctgaacgctgcccgtgccgaccacaccaacgctgttcagcagcgtattgacaacgtcgcccagatgtctggcgttgtcgaggttaccaagcagctgttcgctgtttccaaggtagggatactcggtcacgtatgttgatacttgggtcggtgttgacaatccgtttcaggaaaccgcccagctcgaggccaaggcctacgagctcgagcagcgcactgccctcgctgatgaggccaagtcggtcctcgagtcgtgggtgcgttacgagaaccaggtcaagcagcgccagcagcaggagcttgcccagtccgttattgccaagatccacaaggagcttgagaaccccaaggttctccagcagatcctccagcagagcgttgctgatgttgagcgtgagtaatccactaccgactttaaggaggagtgctaactattctcaggcatcatggcgtccaaggccctgtaaatgggctcactgcattcggcattgtgtacaaaactataagggctatttgcatgccgagttagaccttgcaataccattttgattctttctatattcggacacgtgcttcaagacatgttatgaagcgagtggggcttgaaatgcccagctgatgcccagcatatgaatctgttttggcctttcatcgtagaacaccttgaccagaatatgaaatcagtgcccttttaatgtatgtgactagtaccacttcagagtctacgtagtatatacttgcaagcaaacactggccatttatttaccgaggcaaggctgagtccatgcgcccaaggtggctctatgcaggtctaatgcagcgccaccaccggggccgtggagaatgcgataagagatctatactacgatttcgtatagttggaaaattcgcaaatatcgctaggacatctaagtatttcaagtatctaatattccataattccattgtgtgcacacgggatattagccgctggccaagaccccggcccccgtcaccagcccgtgtaagccggcatacacagccactgttcattcattgtggttatttttcatatcattcatcctcagtcctacaagtattcctgtaaatacttctctcccacctgaccccacacaagaagacccaagtccactcccggcgccatccgacaagtagatgcgccatgccctcactacgtaacatcctccacaaacacgacgatctcagcaccacccaaacacctcgaaatgcaccagcaaacccagcccctgagttgaagctcatccgtacagacacccatacccgagagataatcgtacctccatcgtacccagacgacccaaccccatacccatcctcaccatctcaagaggagcccacatctccacgccggagcttccagttctttaaccgctcccccagacggccctctgtttcctcgcagtcccctccccatcgcgagcgccacctctcaagcttcctacatcaccatcgcagtcgcagtaactcgcgtgactcgtccgctaatatccccgcggacctaccgcagatcgaggaggatcgcggcgcgagtaagcaggagcgcgaggcgctgtgggagaagagggctactgtgcttgtgcagcacaacccgcagtttgcgcactccggttcgtctttgccggtgcggcagggcgagggagaagcttcgctgggtttagggttggggcaaggggggcaggttgggtcgaggagctcaagtcagagtcgggttggtgtggatccaaatcaggatgtaggtggtgttgcttatatatttgcgtgatggttgtcgttgtcgttggaatgtggggctgacgaattatagattaatattcaagaggcgatccgactgcacgaatctggtggtgagttttgctttaatctgcagttggggatatacattaacattgaatatagatctcgagcgatcaactcacatgttcgaacaacttgctgatccaaatggcgcaaataatcctctgagtcaggttctttatggcctcgcgctacggtaatcacgccccctatttctcaattcatagatgctaatgtgtctagacacggatggggctgtcctgtagatgcaacacgcgccgtgacctatctctccgccgcagcatccaattccgccgcggttgaggcggaggctctgcgtgccggagttaagaaagggggagttgcgaaaggcgagctcgttttggctatcttcgaactggccaattgcttccgccaggggtggggtatagcgaaggatcctgctgctgctagacagtattacgagaccgctgcaaatttgggtgacactgatgcaatgaacgaagcgggatggtgttatctcgagggatttggggggaagaaagacaaggtatgtgtgatttccacttagatatgtattctgtgtgtgcctattctgactcgatgtggctatagttcaaagcggctaagtattaccgacttgccgaggagaatgggtgccctactcttgggaattcatggtatgtgcaactgactgcgatatggagtttgaatctaatggatactataggatctggaaagacaagtacaacccgaagtaatccgctacaacaaaggtagctatcattagctctttactacgacggaggtgattattatcacctctatctacgattcatgtgctttacggtcttattgcttgatgtatctttaacttctacgtgtcacgtcaaacattcatggtcgatgtccaaattgaacataatctaaaaccatcacgatgtccatagtcacgggtggatctgtccgcgggaactaagcctgatttgggctagtctgctccatagaaggggaacctcagctcctttcttcaacttacacatatcccatctacttcttgatcttctatatggaagctgagacatcttttagtgcatttctcgaaacatgtgctgacggaggtctctaagcacctaagaacccatctttagtagtggattaactactgagaacctagctaaatcaaaacgtatctcctgaggtgcagaatctttgaaccgagttcagaatgtttcggcacgaggagtgcaacaattcctcttctagtctcagcatgatggttacgcagcttgcagccgccttcctctcatcctagtgaaaggagtcatctccaaatacacgcatacttccagtatgttccatcttgctcattctttactttactgaaagtactgattatctcttagacagattgatgcactaaggtattgtaagtaagtaatttgtcatgtctctctttgcccctctgcagcctttgttcttttgtcccacaaagctatatagttggcttcatggccgggatagcacttatcacgaacgatgagcggtctcgcatattgagcaacctttcattatatattgatatcctatatatacctaggcaaccaggcaaatatcatatatccttagagtcattgaagaatgctccaggaaatcgtcaggaagagggagtaccctatcaggtgtgactatctgaaggtttgttagatcttctcttcctagtttctagaagagctaagcgagctggtcacgagtttgcagggtttgcgtggaaacgtataaaaccctgcaaacagttcctcctttctctttcctttccttctctcttcttatacttactgttctgattgaactggcatgtaacatcaaccgacttcacggcagagcataccttgcacttgctggtgatattacagattatcgtggatgtccccggataggacatgatttcgaggccaagatggcctatcatggtcctgggttattctttccatcgatatcacatattgagctccgtcaaatctcggttcaccattatcctacctttgtcgaacaacctctgcacgttgatcattccagtttcactttgctctcaccaaccagttaagtcaggctctagtacgcgctacttttggctgtatactgactatccgatcatctctaggacctctatatagccaaccaaatcggcatcgcgagctcgtccatgtgggtgacgagcagtgactttgggcctcttccaacaatcagatggggcagcttacaagtcatgtttacattatacccgagcctggaagcgtggtgcttcgacctgtcttatctaagacaatggctgcagcaagaaggttttaccgatgcccggaattgagaatgtctgcttgctcctccaagagttccgcaccaacgtgagaagggtgattggtaagggtggtcagaaacaaaagttgacgcacacagccccgaatgtgccagaaatgagaatgccagctgtttcgcagccaactcagaccaccttggagtccaccgagtctgttgcgaccgagcaggtgtctacacaagcagtcatgagtgagccaactgtttctcagccaactcagactgttctggagtacacccagactgtctcaaccgagcaggtgcccaccgagacagctatgagtgtgtcagctgttcccgaggagttttatcacgatacggacgaacatcaataaaccaatctcctcgtcgaaacgaagaggtccagagcgcatgagcccggccatgcaagaattcgcagaggtggttgcatggctgaagagtgatctcgccaaccacactagtaggagtgccatttccttaactagaggctggcaagtgctaacattataatgtataggcgccgttttgttattccgtgcggcctccagccatcttacatctcctatttgaaatagccgcaaatgctatcagtttggcatcgttgcaacctgcttcacatcggtgctgctattgttattctatcagcgcggctttggcgtaccatgtgtggaagaggaacctgacgaacctaaatattccgatgagccagctaggctctgagctgagcagtcatttctgattacgatcaggggccccaaattatacctgtgatagttcgttgctccaaaccgtgcgataccttctccattcactctttatctttcaccatgggaggcttcatgatacctgcctacacttgctgttcgctttcagaatccaactatcagtgcttggcatgtataagatcgggtatattggttgggctgcatcggtattcgcacgctcgtccctggcatggtgagtttttcgatattcatgctctggtactattttctcacatgctcatagggtaaatgccggccgtgtctcttcgtgtcccaggatatggcacttcctcgcctactggtgctataaggactgattcctatgcactaggcgatacggcacccaacatgcatcctgggaccgttcagttgactattccccttaaatctagcttagagatacagcttcctaagtctaagatttacccagttggtcctagggaccgtgaggttattaacgccgcctttcaaccgttacatgaccaaggaaagatgagctatataacgggacatactactacgggtttccctgtctttattatatagtatacgactcaccggcccaggcgcgaacccgcgtttaagtttttctaccaatggtacgtccgacgcgaacatcgcggccggatatgcgtcgtttcgcatcggggccaggaaatgttcatatcgctatcatgggtttctgcaatagcgtaccctacgttcagcggcaaatggacctactcttgaaagagtttgtggagttctgccgtgcgtacctcgaaaatcgggattggggcaagaaaggaggtgttcgagaaactcctgtcattttggggaaggattaagccctactattgattcgttttttggagggaaaggtgaaggaagcgatgctattcaaaaacgttgaaaagacctcctgtaggcacaagacattccgaatacaaaatagataacactgtcgaaagcatagtttcgaatttagaataaatcaaccatatagaaccagcctgcttagtttttgagcatagtcacgtacaagatgcgccaatatagaagccaactttgcttcactagctcagtgtcttgactacaccggtattcttctcattggagaagtaatcgagccgggccagatcctaccggactctcgggcatctgcttctctgctcagcctgtgcatgcatacggtcggcatttcatccaattaccgggcagactcggcagcctactgatagtggcggtgaattgcaggcccgcatctccccaggttggccatgcatgaagcatattcagactatatcctaatctcaagccagtgatagacccgctagtctcattcctgctagtacccgctttccggggtcaaattgctctgacggttttaagcttggaacgaaccagaacaatgattgtttgaaacgaaggttgatttactacagctagagattcaactgacccgaggattaggatgtgcggaatagttaatggagatgaggatagtctgttatactaggatctctgtgcgtcaagctgtccatgcaggatcgatcaaaaccaagtttctatcctcgagcaagccatcgaggagataatatgccgatgcagctgtgatatgaatatctaatattagccaaacactttagactcctatagaacggtgtatatttcctatcttggacgctaagaccgggaccatgatgttccggtcacatttgaccaaacaagtcaagtcgaccatatcaatgtctgttgcttacggagcacacgctgtcttattttgtcatgcaaatgttgtccatctcctcaattcaaaagcctccgcggtaataataacatcaatatcacgaccccagccccagccccttagacccaccacagtatatcccttcccatctcggccgcccacgcaagctcaatgtgtcaccgccaagccaacaaacaacataaacctcagcggctgcaccaccccttacaagtgcaatgcgaagtataatgcgaagcggctggtgacattgccagccgcttactagcagctctattcaagtcacatcggggcccagattcttgtgtctgtcctaacgagtcaagttgcacaggtctgcttgatctcactatcaatgacctcactcagtgtagccttgtggatatttgtctacattaatataacaggaggcaaaacagcccctccgggtcatcttaaatcttaactagtagaacatcatcggagtatagtagctactcggaggctacgtcgcgagcaatccgaatgacaagactctccagccctcatccatccaatcagtgcagatcaatcccacagctacccctgtagatcccccaatggccctgtttcaggcgagaacatgatagatcttcgcgctggtgcgtggcttgtgtcattggtactccacgcccgagccaactaaccaggtataagacattgacggcgcctgattgatatacattcgacttaattttgctttcgttgtgatattaaatacccattcaatcttcaatcttcactttcatttttacttttaacttttagcttgagtacttactgctattctcacgtatgttcgttctgtcttatcttacaccgtttcttgcccttgcgtccgtctaaagcatactgttctattattatactcggctcggtcgctaatttatttgatcttgtcttactccagatccatttctgaatcttccaacttcacaatacgaaatgcgcgcttcagttatcatcctcggcttcctcgctactcttaccgtcgcgctgcctgaagcataccccaaggctgcgatcgcgtgtcaatcggtgagtcttcaatagcaatatggcaaatacagacaattcctaatgttattaggataccatggtctgcatagctgcgaactgtgccgctgagggatgttgctgtgagggacttacgtgcggatctaatggggtaagtacatagctaccgagcttgatggattatcgagcgtgatttgttgattcaatgctaatgaatgatagacttgcacgccactataagatgttttggagttacaatctgataaagggatgggcgcaaccacgcctttttgagttggcatgagaatgcgactgtgctcaatgctctcacttgtatttatctatttgttaatagtatataattcgaatcaaagattctcaatcctcattgctagtcccatataacataaaacaggagtggtagctttagtcgatgcatctatcgtcctcatggctcagacttagaatggcacatcactcgtgaagattcaaacgaaaccaacaaaccctcggcaaacattccacagacgagagccccatcttcgaccatatctcaaacccaatccccacagcaagtaatccaagccccactcaattcatttcaactccccagcctcaagccggcgttgcacacggcgccagggccgagtctcatcatcatctcgtttccttttcgtctgatcttcattggcactcagctgtctgcctctaacaagaaacccaaccgaagcgcccactatcacaaccgccaaaagtaggatgataatagcggctgcggctggtagcagaaagtagtagaatagcttgataccaccgatgacgaggatcatggttacccatattgggcgcaggaggatgggccattcgttgaaggctgagccgaagaggtcttcgcctatttgttccattttggtatatggtgagatagtgaaggcggtttgatttttttggtttggatttggttgtctcgttcgagatagaaaggagaggagtatggtaacagctcagcatggagaaagatgaagtctttagtcgacgcctgaacttgtcgttgtcgttgtcgtccgttcaaggctggaaagaacccggtccaggaaagtcaggacccagatggccgctttcctattcgggaagtatagctttttcactacctaaccagaaccagaaccaggtacgtaggtgttactctgcaccacatccgcagaattatctcccaaatgcatttccttcaaagcatccaacctcctcctcctagcaagaaccatctcggcaagaagctcaatctcgatctcgagacgcttttctaggtcgatggtatcaccggggatattcccagctaccgggggagcagtaatttgttccgcatctgactccctctgttcccgctccttcttctccttctccttctccttttctcgcttcgctttactctcctcagagttcatatcccatccaaatagtgcggcgagtatagcgaagaggaggaaggcgagaatgaagattatggctattgccacggttaccgggatgaggaagtagattaatgttttgaagaatccgctgatgatggatgttgttattaggagcgggcgcatgtagaagggttcgcattcgaatgggaattggcatggcatggtggatttgggttgttttggtttttgttcggcacggaaggaagagtggtagtaagtttgttctgagggtttgtggtaaatggatgatatttctcatatcctcttctgacttggtttgggctgtatgatatgcactgccccaattgtcgggcgcggttgcatgatgtcagtgcacgacgtgttgcatgacaagccgaggtctgaatggaggaaagggtggcagggcagatgaagacaaggatatcaagtgttgagatcgacagaaatacactacatatttcctacactacagaattaccagatcaaaactcgtaagaaggcataaatgcaatatacacaggactaataacaataaacagcaaagagatcaggtgcaaggtcagtagacaacgtcaaataaaagatgtatctaccagagtcaagtttaaaataaaatccaagaaaggaagaaagggccgatcgtcgtccgtagacacaccaagccgagaaagggaaaactcctagtcctcctgtacaagttcgtgtgaactaaaacaaaattcaaaaatccatcagagacatggcgcttagaagacggaagagcaaccccagtgctgctcaacgttgaactcgccggcgctcttccaggtgtcgtcagagaaggagaagaagatggacttggagccgacgctggcggcgatggacttgatggcagtggcctgctcagagacaccggggacggcggcgccgttggagtcaccggcgttgggccagccggtctcgaggttgatgacgtcctttccaccgcagatctcctcgagctcctcgaactcgctcttggtgaactcaccggcctgggcggcggtgacatcggcgttgaagaaggggtggatgttggcaccgacgatgtcgacggcgctgcagagagtggcagagccgtactgctgccagacgttgatgggctcggtggtggtgaccagaccggtgtagccggcggccttgaagctagcggcggaggactcgatgaaggaggccagggtggcagcgtcgacgtatccggactggatggcctcgttaccgacaacgatcagctcgaccatggaccactcggcccaggcgatgatctcggtgacctgctccttggcggcggagacaccggagccgtcaatgtagacacccatgatgatgttgatgccgagggacttgcaggcctcgccgatgtactccagaccgctgcagtcagtggagtagacacggaccaggttgaagcccttgctcttgatggtggtgaggtcggagagaacggcggccttggtcttgcagtcaccagcggcggtgtagggggagtaagtcataccgtactggccctcaccgaggacggtggggacaccagtggccttggcggtggaggaggaggaggcagagctggaggtggagctggaggagctgacaacggaagcagtgctcatgctgacgggaacaacaggagcgacagtgctggtgctgacgacggggacggcagtggtagcggcagcggcagtggtaggcacaacggcggcggtggtcgaggccagggtgttggtggcagcagggcagatgtaggtgtaatcagtgcgggtcacggtgacggtggtctcatcctgagtgtaggtaccggggacaatggtctggggggtagggtagaccagaacggtgctggtaggcacagaggtggtggtagggggcacaatggtgtaggtaccagccgaggggcagatgtaggtggtggtctcaatcacgctggtcacggtgctgccggagggcttgacggtggcataggggcaggtgactgtagtggcagtctcgacaatggtggtaacaccaccgtaggtgacggtaccgctggggacctcagtggaggtggcaccgcagacggtggtggtgtcccagacggtgatggtggtggccgggatggtgtagacaccagtggtggagaaggtgctcacaccgggagtgggcagcacaacggcaggggtgctagcgacgctggaggtagcgaaggtgctaacagctggcaccgaggacgaagcagactctgcgccaacaccagagacggtgacggtcaaagtgctggtgctggtggattgcacagtgctggtgtgagtgctggtctcggggatagcgatgggagtagaggaggaagagggaatagcaacagtctcagcagggaccgaggaagtagcgggaacaacagactcgtcgaccagggtagcggagccgtagacggtgataaccttggtggtgcaaccacaggtctgctcggcctcagcaggggcagaggaccaggcgctgacagcagcctcgcgacgctggtggaaagcatcatggcgacggtgaacgccatcggccatggcagacccgaccaaggcggcggcgaaaatagctcccttcattatggatggataatacagccacgcaaaaagaatgaatgcccgctgaacgagtgaagcggtggtcaatagaatcgaaacgtggatgagaaggtgaaaagagagtgatgggggggcaagcaaggccttttgatggagaaatggttaccgggggagagttagggggaagggaaaaggagaaagaatacagaggtatacacgcagatacacgcacatacacacgtacagctccaccgatcgtgaattggcaatttaatttcctcgaattacccctggccgagtctagatgtgattagattgaggtgattggtttgtttaggtattggtataacatacatctaacttacatatgcaggtactataaacagtcagatcgttatattctcgcccaacggttacaacatatccagtgtctatgtttatgtctattctatgtctattctatgtctctaactattctatattctacgtcccgtattcgtattactattattatccagcacggatcatacatcgccctccccttttcatctaagccttcggccccagcgtcgaaaacagtgtctcacacccagaatagtcttctccttaccgctgtgagggtccaacttcctttggccacattataccgggtttcatatatctgcccgatcatgcaaggccttgtaccctgtggctttatcttgctggcaagcccgagccctccacgatccaagaattagggcatctggaattctcaattggcagattaaaaccccaaacccaaagaaaacagaaaagtctcttcccgcgccatgtggggccaactgtcatagcgtccccggccagtcccagaaaggaaaggtggcagctaaattggggtcggtgctggaccctgattggctgtggtactacatctaatttccgccctgccgatctttaccaccaaaaccaccgtaccggtattattaatcttacgattaccggccagatacagtgtatattattgctttttcctaattcggactccgttgtctcggattacacggagtcgacgaagattctcgaatgtcttatactctccatacctatactaatacaactactcatcctcatcctcttggaaaacacatgcgctgtaattgcgctggcccccctgtcgatctccaacgatatacacactcatgaacaggccgatcacccggtctaaccaaagtcaaaaacagatgataaacggggcaggaagcttgaattgctctattaatgagtcgcgccgaataggaaggaccggtcaacgagccaccttctattcagagcatagcccttgtctagtgggatcgtggaatcaagaaataacactgtagcctgatccgaggcaaccgatatcttaggatgtacgcgtacaatcaagcagtaggcatgttgtagctatatgttgtatagcgacaatcctaccatccctgtactgagtgttgaccacaaggaggacgaggttggatcctcgatctcttcgactggcgatcacgactcggggtagatcacacggatggggacaaagggtgtcggagattaccgtattctatagatacgtagcgtgactgatttaattgcactcactaaatagtctgatctatctatgttgtagctgatttatggatgttactattgactcaagagttgggcaactagaatgatgttaaccctgtattgtatcgcctctgccacgtttagtccatacacaaaacaacaaaacaactcaagccaactcaacgatccagaccgccagaatcttggccaactgacaattccaatgataaatgaaggccaagataatagcggatctgggcgtgggcaatttactttaggtcaaggcttggcaataccctggttgaggttattcagggggcttccaggggtcggcgtgcggccgaggactgcgattcgtgcagagactggggtggcggttctcgactccgttcagccttgttattggttttctgtttctgtttcatatagaacgttccaaggtctagagtaacggtgtgggtttatgttccggggaagtttctgctttttggttttccctgcatatgacttgtttcttttgggacgtgtcggattagggctatttattttacgctggcattccggatgttctatacaggccacatgggatggcgtttggaatgtgtcgctttatctttatttctaggtcatttcattatctgatgtggtttctatcaacggcttaatcccgagttcagaatatatttgtttgcactttgaagtaattgacatattccgtatgccttgcaggatatatatctcagaacatcaagaaatgacaccatgatcagggtccacagggtccaatatccttgccagaataaaccataggcaacctgaatgtatttgactcaaactcaggctctttcgggccttccagtcacttttgtccgtctctcgtacgagaagcgaaggagggggaggaagataatcgtgtttctgttctacattctttcttagacaagtgtcgcttgtatctagattgcctatcacctacctcatctttgagatgtacgtcgacttcgtatggacaatttgcatggaataatagacgtcgaggtacaggggtcgatagaagaatgacatattagaaagtggctagatttgggagaggagtttggggaatataataaactgacgtcttcaagggctaacctgctaagatgttctcaaccattcattgtacttgtgggcagtgtgtctgagcgatgtgctacatattgattcgtagcgtggaaggttgtctcggtcgtagagaagcccgaaggggtaggatgcatagatgcatagaggaatcaacggcgatagtaaagaagatagaacattgtgtgcatagcgttgtcatatgctaggaatatacggagtagagtgagtgctctaaatatgtatctggtgtactcggtaggtcccgaagtgaacctggatgtacatcacaacaacagtacatccaaaataaagagataagactgtcacacaaaacgaaaagtaacacaatgcaagacgtagatatctgagtcttgttaaatcagagcaaagatagaaaaggcagaacttgtcgctgccgaatctgaccatcaccgtgccacccgatcatgccacacaccgtaccacctcaccaccaccatcatcaccaccaccaccatcaccagtatcttccaatcatccgacctcgaataataatcggcagtgcactctccacaaatcctaattttaaccccagaaacaggaacggagaaacccgcctaatacatcgcaccacatccgacgtcacgactcccaaccaaccacagccagggttatcccggataaactcactcccagggaaaggtcacgctatacagaacatgccccaggaacggcgaacggccagtcccgccatccagcctctcggaaccgtgacggtttgatgctgtcaggccacttgctgtggctttgcatgatgagatgggagaggtggcaggatgtatataaggctggatgttacacgagtttacctattcttcatcacacaagacattccattcatacattacctacttcggttaccttgatacttgatacttgacttctatacatctatctacatctacatccatctacaacagccaccatgcaaccaaccgaccaaaccaagacaaaggccaagacagccgctgccaaagccaaagccgctgaaagcgagcacgcccgtctgcagaatgactacggcgcagactactgggtccgcaatggccaagagcatcgagtatgtacaccactaccaccgccactaccaattccgatccattgctaacatccaaaagcgtgctactggtggacgaggcctcttcgccggtctacaagacgtgaagcactacaacgtcgaccacggctgggctcgtcgcaagtctgagactgagcagcctgggattctggggtctatttggagtcggtatgttttacttcttgtctatatttgggtttgggttggggttagtgctgactttattgataggatcactggactttgatttggactcgctttgctggttccgtttgattcgattctagactttgtcttttctgacatagactaaaaggggattgggttaagattgagatgattgatgtttgcttttggagttggattttttgattctgtttgtttgagcattgttttgttttatactatatctttcttgatataggagttctggtggaagagctggtttctttaatttctttttgatatgtttatgctcttatacatatcgtgtttggatatatttaatatatcctatagacaatgacatgcaataagcttattcgatataatggttccttctggtctatgtaagcgagtaagcagaaatgcaatcaattgtacattagtaaatatacactcgagatcaacagtcaatactctagaaataccataacggtctacatccatgatcacaggaaaacgtaatattccaagtactatatatatacataaccgctaatagatataccaaacgccctcctagcgtctcaattttagaaatgaggtatcaacacaaccaatctactcccaagagtcaatcttcatggtacccttctcctgcagattcttgtgcatgttgaaagcctggaagagcatatgaggctcatgacccatacccttacgcagacactcgaactccgcacggtcaaggtaatccgtcaggataggagtgtagtcagggtgcgagcagtgcttgatgataacacgggcacgctcacgaggagacaaaccacgaacatcagcaagaccctgctcggtcacgataacgtcaagatcgtgctcggtctggtcgatgtgcgtggcgaacggaacgatacagctgacaccggtgggatcggtcttggtgggacgcgcggacggggtgtgcatgatactgtacttggagttgcgcaggaaatcggcggagccgccgaggccgttgagcatgcgcgagcccatcacgcaggtgctgttggcgtgcgcgtagatgtcgacttcgacgggcgtgttcatgccgatgcagccgagacgacggatgatctcgggggagttggagacttgctgcgagcgcaggaggatcttgggcgcgtagcggtcccagttggcgtagaagcgcttgaagccgtcgggggacaggcggatggaggtcgcggtggcgaagtcgaggttgccgctatcgaagaggtcgaggaaggcatcttgcaggacttcggtccacacggttaggttcttgaagtcagcgccgcccttgctgagaccgcctacgacggcgttggcgatgttgccgatgccggactggatggggagcaggttggttgggagacggccgtgcttgacctcatgctggaggaactcgatcaggttcgaggcgatggcttgcgagccttcgtcttcgggggagttgtgcgtggtcttgtcggcatagtcggactcgacgatggccacaaccttctccgggtcgacggggatgtaggttgttccgatgcggtcgtcgggacgggtgacgaggtagggcttgcggaagggggggaggtcggtgccggtgatatcgtgcagaccctcgaaggagggcatggcggtgttgacctcgatgatgaccttctcggccatctggatcagctcgggagaagcaccgacggaagcaccggggatgatgccaccgtcctcggtgatggcagtagcctcaatgatagccacgtcgatagtgggcttgggcttgttcaaagtgtaccaaccctgggaaattgttagcggtgaatatttttctccggtaacgcaaaactcacatagaccaaatccgaagggaacatgctcagatgcttatcgaagaacttgatgtggccggtgttgattcccttggcgatttcctttccaacctggtgagggctgcggcgctcaatcatgttcaagtgcgcccaacggctctcggtgtctgcgccggcggaggcaccgacaaacaggttgtacttcagctttccctcgaggctgttcgtctggacgtgatcggccagcgcattggggatcatcctggatcgggttagcgttgccctcgcttactatagtatcgtcgcggtacatacttgggataaccgacaccggtgaatccggaccaaccaatgtacgtgccattggggaagtggtgaatcagatcctcggctttggcgagcttcttcagatacgatgggcgccgtacacggctcttcaacaaggccgaagcagacatgatgtaggaggggagagtgtcaaaaatgttggaaggaagaggaagaaaggggatctcggggtataagtaatttcgttaaccccacgggcagaggtctccacacaggaatgcaaggccgatagctccgggagaatggatgttttaaaaatttagtcttggactggctatatgtatggactcgggatattagacatggatattggacattgaatactgcatagcttattagtatttaagcaccggcatccaatcgttatatatccttcttcttctattaaatttgccttggaatcgtttaatttgcaattcttcgcattcgactaaatcagagtgacgtcacgtccctcattcggctttggttcggccggtcatcgttcggcttttactaagcggcttctctgctgttcccctgcatatggagtacggagatctataattaagagagagctctttcagacgacatgctatccttccaatatattcaacataaacacacacacacacacccccatacacaacagaaaaatcatatctcggaacagataccccgaacttcccccgatccaccctcgggacagaatcggttatgcgggctcggccacacggagatttcagattgcataacctccgtaatggctcatgcatttcacaccattcggcatatatagccgctagcgatgccgattattccgatttagtaacagaagccgatgatctggaggaatggccctttttcataccccggaagttcgacggaatcccgcattagggcatggcgcacattggggaatgtgcgatatcgtacgacgcgattcttattttgttcgagctttggcgttttgtgaggctacggctcggagtacggggactccgtaactataagctcggctagctgttagcctaatgcgggatagttcgacgttgttaaccacacggttaactatttacaatataaaattgattaaggggaagaccttccctttattgcttgatgcctaattacttagccgacggttcttatatcggcatctgttggattaccctttatggtgaaaccgagatatgatagaattagtgataaatcctcattaatacatatcagaataaagccaatctctccatggccattatttcatttgtgagaataaagtaagagatacttgaagagaaaatagagatacaaatacaaactacggaaacccgtgcaaaaaaagaaaaacattcgtcgcaatttcctcatcgtgtacgccatcctcccctcccacaatcaacaataatgcatgccaatccccccgcttcgcaaggggactgacccgtcgtaaaagttaccaacgcaacaccgtctacgcctctgtaggctcggcatccgtcatctcaacatccgccgccttctcctccgcattagcgggggccgcggagccggcgccagacccagacgcagatccctcacgggccgcgggactaccagagagggtcccgtcgacccaagagcggaaccgctggttgctctcgtctacctggtccttgctgaggccgcgggcccaggccgggttgttcacgaacttctccacgaagcggtcatggcgcttttcgtgaagcgcggccttctccttggcgagttcgtcggcctgggccttgatggcctcagcgtcggcatccttttccgggatgggcgcgttggagcgccagaaccagtcgtaggtgggcggctggtacagcatcgtgtagttgttggcacagatgcggatggtcaagccgtcgtggtgctgcaggctgcggtagtaccgctcgtactcctcatcttcctcgagcttcggaggaaggttgcgcttcagcaggggcatgcgcatcttcgagaactgcacgccttcggtggggtcgcgcatcgagtaggcggtcacatagtaggaccagcgctcttctggagtgagctcctcgttgtcaagggttgcgtcttcgctggtcatcacttggacggtgacacggcggtcggcggggtactgggattggttagttatgtcagggcatctttgaaattagaactcacgaaagtaatgcgatagatatctccatccttgaccagtcgctccacttgtttacggtattggatctcctggtggtgggtagtctcctccttctcccgttccttgaagaaaagattgataatatcggagctgcgatcgcgagagtcgccggtgaagatagatgccacaaacttggaaatcgaggagaagatacgttccaggttgtagagcaggtatccgctctggatgtagaagcgacgtagggtctcttcgaggtgaacctgatcgatatcgcccttaataacctcctcgcacatgcgcacgatctgcttgtaaaggttggctttgggatcgacatcatagaagaaatcactagggtatcgatcgatcaagcacaagtcatgggcagccttaggcagaacaccgcgtcggacttgttcgcgggccgtgtcctcttgctccttgatgcgcaggagacgcgagtaaaggatctcaaaagtacgcaagaagcagaagatgttcaggttgcagtacatatggtgctccttcttcttgtacttctcgttcagtgtgtattcatgctcaaggttgaagttgccctttccgggatgctccatccaccgcagttcagccacgtcaaatgattcctcggaatcggagacggtggatggaacctgggcagcaggttcgtcatggttgttcacaccatcctctttaggcttctcggtctggcgtccgcgttcaagggcatcgcgcagaagatccagcttctgcaggtccacccccttgcggctcccattggacgcatcgtcattggcataagtatcatcgtcctcattgatggcgtggtagacttcgtccatgtacaagttgaaagtgtaacggtccaggccgaagaaagtaggaatgaaatcccggataaagttcatgagccgctgaggatcagcgccaaagccattggtgttgcggtcaaagtacaagaaaagcaagtacacagaatccagaaggacctgagtatcgctgaacttatactcagcctggaacttgggtgggacgcggccactcttgcgactagcctgtccatcctcaaacttagtctgtatgtcttgctggatgttcttggcgacgaagagcttcttgtcggtttgcttggtggcgatggcttggtggtcaagactgcgccagtatgctcgctgcatctgttcgcgccagaccttgtcccactcgcgctggcatgccttccattcctcgagcttctgcttcaagcggtaaagaacaataggaaggacgtggcatggacggaggaacatgtctcggatgactttctcgccgcgttgacggtcgtaaatcttcttgatgacacgctggtaaattgcctcgctttggccaccgagaccttgtggcaatttgaaggacatgcgttccgcatcattcatgtaaaggaattgctggcaaatgggctcaatcagctggatggtgcgggtgcaagcctcgatgtggtgatcgtagtcgtggcgatcttcctcaatgcgatgcaaagcatcttcatactggttcttgcggtgcgcaacaaagccagaatcttccgaagcccaggtgggatgtgaggcccagtcatcattaagaacaccgttgcaaagcggatcgcgtccactgcagggcttttggcgttcacgcttaggaaggagtcggtaactcggtcccagagaccggcagtgagccaggttgacgatacctgtttccgggttcgccttggggtcgatgattttatcctcagcctcttcggcactcatgaaacgtctgaaccagttcatgagctcagcattggacccgatgtatccctctgctctcttgaccaggatgtgacgatcgaggagatccgtggtgtacaggttgcaaagcttgaggaagtcgctgaacacttgcttgttcgcgatgaacttctttacgcggtcaaagaacgcgatttcttcctggctgggagtcatggagaccgagggaggaagaggctctgggagagcaggaatcaaagtgggagagacatttgccatgtcgacagagggctttccatggtgatactttggtctcttgctggcgttgccgaactgcgaattctgacctcggttggcctcagacaagcgagcagcttcggcaccggcaggccccgagatagagccaacaccacctgggccaccacgacgcttcttgctctccttggggtcctttacattaaactggcccaaaggaggcatcttgacgtcacggttaggagtctgggaggtgaaacctgcaggttcaccgcggaggttgctaagaggagcttgttcttcggcttggcgctgcgcagctacttgtttggcatgcgcggcagattccggcaagaactgtttgaagtcctccaaaagatccggagcagtgttgaacaactgagtaacctgtccatagacatcctggataggttttgactcccgctggtaagtctgaagtatctcgaggaactgcttgtagatctccggcgcacttgaaaagcggttcttgatcttgttcacgtagctgatggcgtggttgaactccacgggaccacgcttgttcagatcctgagcaccctggagcataccagttccgacgccagccaggttgttcatcggctgggtgagagagttctgtccagaacccatgagggacgacctaccaagtccagcagacgctgcggaggcagcgccttgcagctgtgccactccacggtggtcttgctgatgagtcatggcggaagcagcttgctgctcctgttgggtagggtagccatagtggtgctcctgagcggggcccggtccatcctgctggtacatgccgcccatcatcctcgagccaggagagtaggaaccagatgtggggccctgctgatcctgctgctggccttgccagccaggtcgagtttggtcacgatagaaatcggaccgaccatgcggatcaccggaggggggtgcattggtaatcgtctcaaagggacgtcctgcgcgtggcatgctcagtgtgtttgtaccagacggggttgtgacccgaatcgcatcagggttgtcttcggtaccgcactcaatgcggtagccggggggcaaaaaggtattgaatccttgaataagagcaggatgaccattgaagagtgtcgaaacacgttgaatcacaccaggcgtatcaatagcctggctcttgaaatccttcatgatatccaagaaacggttgtaaacatctggttgatcaacaaaccgcaccttgacctggtcgaggtagctgagagcatcgttgagaatcggttgctggccctgggcaagagctgcaacatttcctggaatttgctgaccggcgttgttgtacgttatcataggctgtcctggtggaccggggtgttgcatgtacgagcgaggtgtgccatcgccgtgttgcatttgaggaccgaacaagccagccgcagactgaggtccgccctggtggctgttctgcgggtttccgccaagagtcgagaggagtccgcccgggccatgaatggagttggggactttattggccacgggttgatggagaggaatcgagccagtgtggctctggacagggtggtggttttggtcgcggcgatctagttgccgctcaatttgttcgcggtggtcgcgctcgcgctcacgatgagccatttcttcgtggcgctgacgctccatgatctcgcgctccctggagtcccgctcccgctcgcgattgagctggggagaagcgtgttgcatggcttgaccaattccgggaagtgaatggccgctgttatgcgacggacctgcttggtgctggccgtacgcggaaggttggtgcggatttccgtgggtctggcttaattctgccagtccaggaagagaatggccacccgactgactagggtggtagggtcctgtaatcgaatgattgttagttaaaacgtttttatcattggttttccgtagaaatcatagttcagaggcactcaccacctggaggggggagtactgggcccgagggctgcgaggcttggccttgctgagagggattttgactgttgaagcgcaagaatatcggattagtctttgatctcaagccacctatagaagtgctcgtacctgaatgaccccaggggccgcggctgctggttcatctgatccatgccaggatgcgacggcggcccaccggaggagtgccagttatcgtttccagaattcatgatgtatgcacgaactccggtgtgagagaagtagaaaggtaggtttggcggataagaagggtcgagaggggagaaaaagtaacagggtctgctaatcagctagagctcgtggtctcgtcggtaggaatcgactggcaacgctcaggttgcagtagggtcacagcatgacccggagtcttgcagattagaagacagaaaccgactccacgcagcaagaaagaaccggcagagaagtatgatagacaaggaggagacacacactggggtgatggaattgcgcgcgaccgatcgcgggctcctgtggaggctttcctctccggggctagcctcttctggcttagtaggtgcttatcggagatttgattatccgatgggtattcagaattcaattcattacggtatctattgtatctattgtatccattggcgggatttccgtcaatgggaggcggtacattggtcacgcgtggtattgtgcgataggtcaatttcagtccgccttcgtcatcgcccgccattgccggcagaaaaacaatggctgacattgagtgggcaggtgaacaaatgtgaatagcatgagtcatgaatagatcaatgacttgaatagaactgttattgttcattgtatattctattgtagcaagctgcataatgagactcgttctgaaggctggggtacctctcgcttgttaagcctcggaaaggggcggaggataagggctggctaacaatgcgtggccttctttcagtactttattcaggcgaccaagcaaaacatctaaaccatatacttggaaatagggaaagacttaacatctcaacactagttgactaccatatctatagtctgtactaactatggaaatggcctcaaacaggcatgacattctctatcatgagttggccaccatacaacgcctttggcaaccccacagcaatagcaggaaacgagtaaaaggggacataggtaagaaagactaggtctccaagactcagacagatgagttccacaataagaacagagatagggaaggggagggaggatagtcctgtgattatggaacctgtggcttgctgtcattattttctggttttcattcttcatatcttgcctgttcaccaaggccctccagccacccgatccaaacccagatgcgcctgtccatggaaaatgataatggcctcgtgacggtacggacttggtccgattaaagagcggagaagacaaagagctatatcgcaattagcattgtaaggtttagatagaggtaatactcacattgtttgtcgccgcaattgcaatgctgtcttcgaagggatgccagctcatgtgcaagatctttttgttgaagtcgatctggtcggcatcggtctccttcttcatgcgactaccggggccggcagggctgccggatcgcgaaccagccttctttccgttacccttgctcatcggcgtcggtacaccaaccttctttgccttgaatgccgacttgtctgcctggagcacaatctccgtatccttttgttcttctgtagggtaaatcatgaagttgttgttgtaactgccggtcataacgttctccgcatcgccagagaagaccacctcgaacttatcaaagatgctatcgttctcgtacgtatcacagaggcgagggcgcaggtgctcgtggatggggatggtcttgattggctggcgttccatgttgacatcccaaatcttcactgtcaagtagtccctcgacacaatgtaccgcccgtcgttggagaatcgcacatcggagatggaggagataatctcggagaagaaggaacgggacgaggcatcctcttcttgttcgaactctgcaaacagtcagtaaatgtcattggcgccattccagctgtacatacgcttggcgtgttcgtcacacaacgccctttgtcgcatatccgcaagcttgattgtgcccttggagctggcatacatgaaccagttacagctaaccgggtggaactcggccgcagtgatgacctctgtgagttcctccatattagctggcttgatatccacgatgttgaagctctgatcttggatgttgagattccataggttcacccgcaggtcgtcactgctgataaaggtttcaccatcgctgttaacggagatgctatttatatgatacgcgtgagcgttggcgtatgttctccgcggaacggcggcgacaaccgtgtcatggtgtgtcagacgaggcagcttgagcgcagaggggtccttgaaggatatgcggggtgcgcgagccatacccccaccaccgacaggattcgcgggggtgagttcactcgataagttgttctcggcgaccactttcagcgacttgtcgaagaccttccaaagctttatcgtcttgtcgttcgtcgaaaggaggaaatgggatgcattctgtcgtcggcaccattttatcttgttgatcttctcttcaatctctagcgacttgagataatcgaactctggctcgtgtgactggaactctgtgtggaacttatactcgcaggtttttttctgtattgtttagtggttagccgcaagacaagaaaaccttgatgacggaggggtggctaccgtctcatttcgctcaaacaacaccacccttcctcccttgtcaccagtggccaggtagttaccggtatggtcaaattcgacggttgagatgatgtcggctgcatagcgcgagtcagtcgatgcattctgtagaaaatgaccaggttcggccgagaagtgcgagggaggccaaataccttctgtaatatcttctacatcacccttatcgccgaagcatctaatatcaagttagctatcattcaatgactgtgattggtcgatggcgctggacaaagggaagaaaaatggaaaccataggaccagaacctttgacaggagtgagccgggcaaacttactgtgtgaacttccaggtaggtgtgcctgggtctctgtctaccattttcacgttctagctagcccttgaacgcgacaagggcaaggaccaagataggagggacgggaaatgcgggttggcaagtgcctctgaaagctctattgtcgatgcaaagaaaccctcggattgaagcgatgtagacgcgatagccgacaagaaagaatccggtcgggtgggaagaacgattggatacggagatggagagaacagtcggtcaccggagatggtgtgcgaggggtttggagggcggatagcggtaaggcgaaaagaggggcagagggggggaagagcaacgatccaagttggaaagacgagctgaagaagagctgttgccgaatgaaatgggcaacgtcgctggatgatagaacacaatgaatgtgttatgagtggacccgcagcgcttgagaagggataagagaaaagtttctattgagcggtcttgagttagaacggaactccgtaaaagatatatcaaacgctccatcggttgtggggatgggggttgcgtacctgatctggagcgatgaaggaaagacaaaagaagttgtcaggtgaagttgcctgagtcgaggcggtggtggggagagagttcgttacgagataccagctgacggttcttggcccgtcaatatcaacagattgtggtttcgccaaagatgaaaaaatataaacttgattagaagattgaatattctatcttcaccagaattcaggtcgggctgcaacatgctgacatcaacactgttggcgactgcaacatggcccgttgcgcccctccccggccttgcaacccgtatacgactacgcctgggggtagaggtggaatatcaattgaaatcgtgagatataatctagctaattgcttggatcgagcgagtctacagcagtcaattctttatttcatcgtctatatgcccgaagctgtactatgcgcctctgtcgtcatccttgaggcccaagcagtctccgctaaattaagcattggcatatatcatatgctatctatgttgtgaagagatgcgatactccatcgaattgaaactatttattcaggtccggggtatccatttgagaactcagctgggtatactcggttcttctggaagtatatatttgactgccgagccctgtcgtttctactctacctaagccctaattaagatcctataactgaaaagactctatttaccttattaactgatattaactcttatataacatcccatctccctattacagcctataggatcctacattctaatcccactcaccatcacatgcttccctccaatatccggcccaaagcatattaagccgaacacgccgacaaccttggaatcatctcaaatttcaacctcacttaatcctacacctccaacccataatccctaatcccaaaaccaaacaccaaagccatgagcaacccagagaatatgcggggcaatcccaactccaaaccccaaaactccaataccccagcctcagccccagccccagccccatcatcctcaacctcaacctcaaacacatcccaaccccctccctcccccgcgcccccctcgctagcaacccgcatccaaacctccgcaacaggcctagcaaaaagcgccttccagccaagccccgacctagcgcagaccctagcatcgagcacaagcagcaaacaagccggaccgccctctctcccaagcacacagacaagcagggatctatccacaaccacaccacagcatggaggccccagttccagttccggctctgcagcacaatccttccgcgaaccggatacatatacctcgacgggtggattcggtctaccggcattgacagaagacgagttccagaacacatacgcatacaagcgagaaacaggccttctaggcacaaccatgactccaaccacaaccacatatacaaacacaaccgacactacccacgaagacctccaaacaaaaggaaaagcccgcgcccacgacccaacccagcaccagctcgaatccgtctggcagcgccaatcgcacgagccacacagccaggatacatatacatcgctgacatcgccggaagacgggtcagcggtcatctcgctgctctcggacgtaaccttcgatccgaatttcgaggaccccgcgacggtgccagatacagaggttgatattgctgctgcgccgggtccgctgtctgcggctgagcgagaggcgctggattcgttccggaaggggatggggctggatggggaggataaggggcgggtgggacggttaacgggtgcgagtctcgtgcctgatattgatgtttttttgagccagggacttggagggaatgtttcgacgtcggcttcgacttcccttcgtgatgcggttctgacgaatcttcctggtgcgggggattggattggcgttcaggataggtatcatgatgaggtttgggggtttttgcagcctgtgcttgaggatgcgagggctgagattgaggagaagggggagggattggggcctgcggaggatgggcctgctgtgagaaggttgaggatgattttgatgcatatgaaggggtgattgtatgtgtttgggatatggagtggagggttgggtgtatgttctagtgcttttgtagtagggatctttggtttttttcgatataccgtgtacatttaaatgtaaatattagagagggagtgagtatgtatttggctgtacaaagatgatgggtaaaacatagtttttggagcagacctaagccctgaacagagggactcaccacagctaccactacagtacaactacatcactcccaaacatatatattccaagaatatattccaaataagctatgtatgtatgttacacaagaaccaaagttgacccaagtaaaatcttgaatcccgaggactgcaaaagcaagcgtgtcaagccagcacaagaaacaacagaaagagaagaaacgggggtatgagagatcacacgctggaggatcatatttcatcggagagcggtcatcaaggagaagagacataaaggagaagcagggtttaatgtaaacctacaactccaagctgggggtctggcccttgacacgaccgatcacagtctgagcggcgtacttggggatgacctcgtcgtcgtgcagcatggcgaactcctcggtagcatcgcgacccatgaagttgtacagggcgtttgcgccgccggggtgctcgtcgacccagttggtgagatcgaggatgacgcccttgaccacgacccagaagtccttcttggtgttgtgctcggcgacttcatccatgctgtactccgtctcgggaaccttgaaggtcgcggggtcgggcttgggggctggggcctcggcgctggcggcaggtgcagcagcggggacagggagagcgggcaggctgccgccggtggcgccactgccccactcgacagagatcttgcctggggtgttggggtcgatgtggagagagagctggccgagacgctgggaggcggcgccgccgccgttgctgaggagcttctggaggaggtgctgggtggcggagtcgcctgcgacacggccgtagacgacacagccgaggagggaggaaccgccgagacggttggcgccgtggacgccaccggcgagctcaccgcaggcgtagaggccctcgaagggcttttcctcgctgttgaggacctgggcgtgctcgttgatctcgatgccgcccatggtgaagtgcagaacaggctccatgacagagacgtggaactcgtcgtcgagcttgaagggcatgttggcgaagaagcgcttgttccaggggtccttcttcttgccttcggcgatgaggttgtactcgtcgaaggtcttcttgagggctgcttcgccgcagccgatttcggcaacgagctcggcgccggtcatcttcttcatcaggccgcggccggtgtagtgacgggtgtggaaatccaggaccttggaggctttgctgttgaggacgaggcggatgggccacttgcccttttccttttcttcccacattttgccggagacgtagtcacggtgaccgagctcgtcggagaaccgctggccgtcgcagttgaggaggagaccaccttcaccccggagggcttcggcagccaggaacttgaacttggcgccggggtccttggggtcgacgagaccggtagggtggacctggaccttgtccatgtcgatgccgttggcgccaatggccatcagcatcttctggccgtcaccagtagcgtgagtaccgttggtagaggacagcccgtaggtgtcggggcggtacttcttgaggagagaagtctcactgaagtcagcggcgtaaccaccggtagcgagaatgacgacaccgtcggcgaccttcttctcgccgtcaacagtgtaggtaacgccggtgacattgttaccagacttgttgacggaggtgacgtcggccttcttgatgatctggacacgactgggctccttctcggcgagatcttccaatcgctgcatcagggcgtaggtaatggccataccggggaacttggcgtcatgaccgcggtgtgtgcgggggaaagtgtgtcctccgagacgggagacgagggtgaggtcgaggttgaagacatcctgcagccactcgacggcggcggcggacttgtaggtcaggaccttgatcaggtcgggacgggccttgtcacgggccgacttgagggtgtcatcgtagaactgcttgacgctgtcctggatgccgagatcgacctgggtgcgggtgagagcaccgttgataccggaagtggccttggtagagttaccaccgaagaacgcctgcttgtccagaaccaggacgttgccaccgttgaggtagacggtgtgtgcggcactgaggccagagactgggagggtcagctagggcagagaatgcggggaaaggaagcttacggccaccaccgaccacaattacttgaggtgcagccattatttatgtatagttaggataaagggaaatatggggaggaaaagaaagaggaaggagggaaaggatcttaaagaaaaggaccgggggaggtcagaagccgacggtctatcggccgaggcaggacatgggaggacgtggggagacaaaagatggggtacccgccggacgactaattggccaccgctggtttgttcgtattatctggggaagacgggatcacatgcgatatagggatggatgtgtttccaaggctattaggttgaagtctagaatgtcattttcatttcattttcacatgcgtcttggtgtcacattccagtcctttcaagggctgaaaaggaggaattggataggtccatagtcgacggaattagactattgcaactagaccggtgggttagaaacaaatacaataaatagacatcgaattccggcttcctcggtctttacagtaccaggtgccaacctcggaataacaatcgcggccgaagtatccgaattgtccacgggtggatggcatgatgaggagaaagtaccacttaagttgaatccttgcaagtgggcagacatgtaatccagctacacccatatatatcgtgtacagaggtgtataatacggactttatatccccgtcgatgtctgcgatatcaaatcgccagcccaggggccttggaaatggccagaaagaggcaaaagcagttgccggctgaggaacacgtggctgctgattggtggaatctcggtgtggggctgacctaatccggggatgggaaatgcctcggtggggccgatgacctcatggatccccgtgcgtcgattggtgtttttcgcttcaaatgccgaccttcttggtctgctgtatatacacttggagaggagcttcatcggtttacactccaccagaccttattctcgttgagctcaacattacatttgcctattgtgaatatccgctacggtcgctcgggtcaatacccaccgagaaaccatcaaacgggatctgtacgagacgagtgggctgttgggatataatggacacgccgatggatatggtgtactccgtacatattctaatgaatcaaaacgcttatggcagatccaaaaaaagcctaatccatccaggtaacactcttcgtaaccaagaactcattcaatccctcatcagtattgaaccggccccagccactattcttcacaccgccatggggaagagccggctcatcatggatcgtcatgctattaatatggaccgccctgcaaaagtcagcacagatccacccaaatccgaatctagatctgcaacaccaacatacccagattgaatgcgtctagccatcgccaagcccctccgcagatcctccgtgaacacagacgccgagagtccatacccacttccattcgcgagacggatcgcctcgtcctcgctgtcgaagggcatacacgccgcaacggacgcgaacgactcctcctgccacagcgccatgtcttccgtcacgccgcctaggacagcgggcgccatccgcactcccgagtcggtggggacgctgtccgcagacccggagatgaagtgtgcgcctgccgagacggcgctggcgatgagggcttcgacgcgggtcttggaggctgtgttgacgagcgtcggggggagggctgaggctgctgcgccggctgcgagggccttttgcagggcttctgtgaaggctgggaggatggaagtgtggacgaggattcgatcggttgccatgcagatctggccggactaacacggaaggagataggttagagacagatatagatatgcgacgtgcgacatatactcacattcaagaatgcacccgccaacactccctgcaccgcagtctgcaaatcagcatcccgacaaacaatcgagctattcttcccgcccagttccataagacaaggcttgagattctgaccgcaggcgcgcgcaatcttccgaccaacagctgtgctaccagtgaaatttatcttgcgcacggcctcgtgctcgatcatggcattgacgacctcgggggcatcctgcggggcgcagtgaatgatattcaaacagccagcgggaaggccagcatcctcaaaggcacggccgatagcccagtagcagcggggagttagctcagaagacttgaggactgtcgtattgccagctgcgagggcacaagccgcagagcgaatgccaaacacatagggcgcgttcctgtagaaccaataatataatcagcctgctatcaatagcattttccacacccgaggtcgatataggaaataaagttctcgggaaccagtacccaccacggcacaatccccagaataacacccatcgcctccttaaaaacaatcgcactctgaccctccgtctcgacgaccggcacactgccacatatcgacgtgatgcggctcgcgacttcgcggagcatgcgcacggcgagcgggacgacgaatcccgcagaggcgccgacgtccgcgcccatttcttgccgcatgtactcggcgttcatgttgaggcgggcttcgaggagatcggcggctttgaggaggatgtcgcgtctcacggttggtttggtctgcgaccatgaggggaaggcggcggaggcggcttcgacggcgcggattgcatcttggggtgttgcggccgaggcggtccagatggtcgtgttggtgtaggggcttgttactgggaaggtgttgggggttgtttcttcatggccgtttatgaggagggggacggtgaatccggggttggttgagtttggcatggtggggtacggggtagaggtagggtagagataggagtagtatgagtataggaggtatgcaggttgttgtaggagataatagaggcagtattaacctcggcatgaatatttttactcctttacatgcattgtattctatctcattccgcaacaattgaattcggagctgatcgcggacgatctttaggcaccgcgttgcctaatggaactattccgcgatatgcgaccattatttgatcgctttccaccgtctaatgctgatttttttatacagatttcgtctatactgtacacaaatcggcacattcaggggtatccagtgatcgacaagatatgaggtaactgaagattgtgggattcaggtccactgcgcgcaattgggcttggaagagcgccctaaccagctatctgaagaacccactccggtgtggcctgtcttcataggatgtgcatttaccccgccaccttctttattcggatgcgttcgcagtagcgtgtcaagttaaacttcgcctcggctgtttaatagcgcggattttcaacgctattgactcgggatctacattgccagtttaaccgagacttgggagagaagtgaattgtgggtgagaccatagtggcgtccggatggcttttcagtctgtggaggtcatacatgaatatgtatgcagtacggagacggagtgtgcacatacagatccatgaggatatatggagtaggatccaagtgcgaatatggatacatagtctaatggcaatagtccaatagttgatccttgcaaggttgcaatcggctcaagttcgcatgattcagtctcagctggtatcagatggcgatcgcagggatatcccttcctaatatagcggctaacagcccctacttggatccactgacctactctacagagaaagcatttgtcattccttgaaagaagctatgctttgtatgccgttgtgcggtctccacgatacatcgctaaagacccaaaaatcagaatagggtctactcttctgaaacttgtgatggatctcattgcatcatccacgtggttcagtcgcgtatattccgcacgaaccagatccccattaggacaacgatcggccactaggggttgcgtgtgagtggataaacaatgggaatgtggaatctcgagctagcctagggttccagggccccggactgatctggacactcgcgtggtacatgttttatatcggaggaacgcccagagattgtgtttcccattcattcctttcttattcatacataccataccttcttgttcggttgcagctcactcgttcaatattgggttgcatattgaaagtacaatggcgccaagcaagaggggttggcagatgattgagatcgtttcggtcttggtcgctctgtgcctgatctcgctggtgctgcgtgtctttgctcgcattcgcaggagagtcgggttcggcgtcgatgattatctgagcatgttgtccatggtgctcctcattggcatgttgatcgagctgattctttgtaagtatgactccaccgactggaattcatccgtactaacggctaccagggtgtacaatcggaggcaatggagtccatatcgcggatctctcccccgataccctcgtgaactactggaaggtacataccccgcaatatccaatatcaacaacccaacctaacaccgctagatcttcctcgccaaccaattcacgtacttcctactcagcccttctatcaaaatctccatcatctgcttctaccgccgcatcttcgcaaccccaaagttccaaaaagtcagcttcggcataaactgcctaatcgccgcatggggcacaggaatcttcctcgcgtgcgccggacaatgccgacccttacgctcctactgggaccacagcacgaaaggaacatgtttcaacgcgaaagaattcatcgtcgtcaaccaagccttcaacgtagtcatggacttcgtgatcctcgtcctgcccatcccaatgatctggaacctgcaccgcgcatggcaagacaagctcgccctaaacggggtattcgccctcggcaccttcgtctgcttcgccagcatctaccgcatcgtcgtgctcttctggatcagcccgtccgacccaaccttcaccgtctaccaggcgacgctgtggacgcacatcgagcctgccgttggtctgatctgctccaacttgccgattatccgcggtctgttcccggcgtttaagctgaccacctcgcgtaatggaacgggtccggcgtatatcaataccgattacacgaattctttgttcttgtcgaattctggtccgcgctcgcccgatctcgagtatgctaagatgtataatgcgcagattgagagcaagccgcctggttaccttggtgatgatatccatccgcagacgattaatgttcagacggatatttctatcatcccggggaatgattctactacgaggctgaaccactgaggtggtgtgctgttgatttacgccgttacgatgtgatgatatttttatcttctgttttgggacgggatattggagcgaatgggtttattttcttggaggaaagccgaatctgcttcggctgtagctaggtcggaaatggcctaccggatatcgtaataggactaaacagaaggggctgaagaggatgcagagcgggcatatcagtatgccacttttccttcactttatgttcatacatatacgatttacctatgtacacaatgaatttcttcgattttgcctaataattcatactatacctttcttgttgtgatatttataccaaaattgttatttattcatggatttagtcgaaaacattcagaagtacgttgatagaaaggtgtatgaagccgcagctttcgctttgcaacgacggtattttaattaagtatagtactcgagagacagatgcaacgtatatcagcaatcgagcgtgatttccatttctcggacaggctaaaaggatatgcaagagtagtagaaggcatgagttcgtaggtctttcatcaggatacacagacgagatagagcagatcattcagtgcaccatctggctcgtggcgaattcctagaatcaaatattagcaagaagaccaacctcagacagaaggaaagacataccgggaactgatcagagatactagtcgcaacacgttccacatcctccgcaagatcctgcacaccgagatcccactgcctcagcttcgtcccgttagaagcacccgccgaggagccaccgagagtgtcagcatcaaacgagataaccccatcaatctgatcaatccggccacgtagccgtccctgctcaaccatgcgcgcggcataagcctccgccttctcgccagcagagacatcacccgaagactgcaaccccaggatcgagcccaggtcatcaacgtggatattctcatacagcttgctcgccgccacgagattgtgctcgataaccgccttgtcgagaacggtcgtgccgtccgccgtaacagcgagctggtgcggcgcaagtttcttcgcgaacgcggcgacttcgtccgctgtaagcagcctgtccaggaacatcttctccaagatgccgaattcctcaacggagggcgtgcggtcatctttgtacagacgagcgagggagcgggagcgctgcggaccggcaggcgcaaggacagcacagcggatcgccgcggatagggccgtcaggcggtcttcttcgtcgacgcccggcgcaagactcacgttgaaatattcctgggcggcgtcaaggaagcggcggcgggcatcgaggatgcgggcctgggagagctggaagtagagctttgcatcgtggtcctctattttggaggggaggttcttgatgcggttgaggaaggcttcggcgttggtggtgtcgtcgtcttcgaggtagtagcgcacgatgcggatccagaggcgggctttcgcggcatctgagactaggcgctgcgagctgtcgatgtgaatgccctgtagggtgcgggcggcggctgtgtagtcttcctgggattcgtaggcgtctgcgaggatctcgcggatctgcgagtcttgttcttcgacggaggccgagcgcgtgtggaggagggtgatggcgtgctggccgacttttatttttgtttccgggtcgagggattggaggactgtgatgaaggcgtcgaggagggggcgggcagcgacgatgctcacttcttcgctgaggattgagtctaggtagtagactagatcttgggcgagttcgtggccgctggaggttgctaccatctcattgaggagctcggtgtattgctgtagctttgttggctggtgcgggtttgtttcgatgcccgctagggcgttggtcatcttttgggaagccatgctggtcgagtgagtgaaagaggttgtcaagagagttggacgcggagtggtggggacatccgagctcctgttatcgataagagctggctggatgtatacagccctattccgtagagacagaacaatggaactcatttaatctggccataacacaggtaggattagtcttatgaagatgattcacagatttcattttccctaagtagctatatgcgtaggggcatcttcatatttgaactaaatgcattgatatgcgccttctctcccttgagtgaaaaagaaatcatatgcatttgaccttgacagcgccacaaatgttaatttaatcctttgaaatgcctcggaagtaaatatcacggacggtatccctggtaatcgcagaatatagtgaagcatacagttaaaatacgcatggtcggagccttggttaggcctatcctacactctttagtccctctagtcgggaacggttccgattatgattatgataattattgatgcctcggggtattcaagcttgatgaaaatgtgacaatgtgacaacaaactacaagcaacatggctttctaggatggaggcgtagcgctaagaaccctggaccccggcatattaggagccgacaccgccagcgcaactcccagtaaacgtgtcttcattatctctatcgattgtatctcgtacacctgacccatagccgatacttcgttgttctatctagactcttggggctttacaagtgcccgaagatacgcatcacttgtgaaaggacgcgccaccgttcctgataggatcaagacctttgtctatcacggaaatcggattgaatatcattatggctatacagagtgtcaggtctacccccgagtttgtttcgtctctctactaccctgtgtctctgactgattaaaatcgcatgaagggccctactggaagcgccgatatgcagtcaccctatcccagatgcatccgggaagctcgcggtctacacacagcggggttattcgttcaaatcgcacagcgcgttcgcacagattcgcgtgcgggagatggatacaccaagatcctgggctatcaccgacaaccctcatgccaattatccgagatggctcagccgcagcgagaaagctcatctggctggaggtcatggaaaatgggcacagcattgatcgcagataatatcaccttcaacatgctctctcacctagccagcagcacacaagatttgatatatggaccgccttgggtgaaaccagaggagtggagaaaatgggacctgcacaacatgccgggaactggaagacgccacaattgatcatccacggagcactaaatcgtcagcatcctctgaagccctggctgcattcaacactctgaatttgcagtcagttgagagtgctcttctcatatttccggatgagggtcatcagatccggagccccgagaatttactcttgtggtaccgcactgtgcttgactggttgaagaagcatacaagacaagatgcatgagatattccagaagattcagcaagtgctacgaggttgtcaacctacataagcatcatttttagtagttggtagtcatttcaacgtctttctcgaagtttttctctgactctttctccgagtcattttttgaagtgattgcttttctcatagaatgataagaataatctgcaaatatgcaaaccaaaaaatcccatcgtctgcttgagcttaccaatgccaaggtctagatagacgtcaactctgggtgatagcagaagatagtgaatggcgacgtctggcaacttgaagttgtggttacggtaatgaattctacaggtaaaatacgtatattacgaataatatttacgaaccctgcccgtcaacaaccacattacaagaaccttcaaatcctagaaacttcgacttgatcattgttctgtcccacgaaatggcagaattacaggaagttctaaaagactttattgacattcttgacctaagacaggcctatgtctggaatgcggattccgcgaataaacccctagcattcccaagaaacccacgtgcagaaacgcttcttcgacgcaaattgcttggggatcttctgccatatcctacaatgttcaattgcatctggatagcagagggtgaagaccgaggttgcttcttcttcattgcctagacgatataaggaagcaaatgccttatagacgaagacggccaaagaagactttctttgatcaatgatgctaatatggtgtcaaaggggtatatcatggtcgattgtcacgctcgggtaggggtgtgtctaagagggcaccgtaaaacctatctcgaaacccgaatgtagtgtttaaatagagaaggttgttattcttgtaggttatacgaaggctttgaataatattgtggaactagaaactagaacttacatgtaccttttgtacggtctgcctagcaaaaggtacatttatatgggtagaggccccttgtttgcgagtctggaatttggcccttcagcagtatgaggacaattattatcctacttatgaaagaagaaaaggaaaactcaaactcatcataaaaccagcccaccttgggtatcatttatctcgaaactaagttataccaattaaaaccaatctatatccaatatcacagttcacagttcacaatcttacaattcacacctttgtcaccaaagacacacaccgtctttagatctaaccccattccagtttaagcccactttccaagcagagccatgataccagcaccaaggagcatagatatgaccatgaaagccaaccgcttgttgtcctgagtgcggtgagggtcgaacaagaagtcgcgagcaagcagctcaacgagaccagtgtacaccaagattccagcggagatggcatccagcacaccggagacaacattggcagtgtaagaaccagggttgtaagtagtgcggacaccaagaccaatagcgatggaaatgggcgtcgtgagaccataggcggtacacaagaaccaaggcagccagctccccttcttgaatgggatactggacatgcgggctccaataccgagaccctcgaaggactggtggaagaccagaacagggtaaagtgtagcaaactcgtcaccggcaacaccgaggttcaggccgataatgacggagtggaagataacaccgaactccagaatcagcagcgcggcaatttgctgtctgacagagcgctcgatagccacctcctcggactgcgactcaatctctttggcttgcttgtcgtctgcgtggcgtcccgaaacacgcgagtccacacggcgcacctcgcctccagtcgacataatgggctcggggtcttcacggcagataccgtacttgatctcgacgtagcgctcggcaccgaagtccatgaggaagaccatcatcatggatgtcaatacgattgcagggcaccatgagtagtcggcccagtggccggtcataccgacgcaggaggcgggaccgatttcgtcgtaggcgggatcgaggagatggatgaaggctgttgcgacaattacaccagcaccgaagtaccttgcgaagagatagacgtagactgggatgcgcaggcgtggtacacgttgtgcgaccacggggaagaaggttgctgccgaagagatgaacatgatgacgaagatggcggagattcgcgcgcctagctggccattgtattcattgccttcggaattaaggtaacacacgatgtcagtcgggtcggctgtgtccaggtcgacattgtgaggatcgaaggacattttgggcggttatgttggtaaatcgtgccctaacgttcaaagaaagaggccgatataataagatcgaagaagagggaaattcacacggcgatcttgtctacaggtatggcaggaaatgcctgactgttttatattggagaaaaaattttaggcctcttcgggtcctccgttgaagtgaggacctttgggacgtctcggccccagttatattagtctggtggttaccttgtattgtccgttccaggttgcattactcgcttattctagttgccttggacctttgtatgttattataatatctaattaatgtaaatgtttctaatccgcgttgttgttgttgttgttgttgttgttgtgctgagaacttagggcttccatgccccttgagatatcaaatgcccagacgggaacaaccaccagccctacggacgtttcttttgaaaaccaaggctcggccaattgcttgtcgaatcttgggacgatgcaagcctttcacgcaagtcttgctggtgggccaaatcccgtcgtagtgattgggtgttagcgccacgagtttcccccaaggtccctgaactaagattacgcgaggtcaaaccctgccatcacgggtttttcatcgaggagatatgactgaaacgggcaggtggtgcgtagtagctcgaacttacatgtccatttcatcgtcccatgtgtactgagtatgtttagagatgtggatagttcgtaatataaacatgatctgatccgctccgcagagacactttccgtcgtcaagcgcggtaacggtgctggatcggctagaaccgagccaataatggattgagcaaaggaatttacatcgtaagagcggttcgtgtcgcgtcgtgaagatatcacattgtcatggcttcatcgcattcgttagccttgtcgccacccattggtgggttcagtacaaaatcactcagactaagacaaccctgcgagttaaatccggactttagactgaaactcacaaggtctgagagcactaggagaaaatatttgtaaccatgaaaaagcaaggttcatccaacctgaaagcaggaggccatccccatccatttcgactcataattgcctaacactgccctagccagagcgctaatagtaacataaaacataaaaagatcataaaacaaatcataaaaagcggagttgaatgcaaggtatgcaaggtttcttcataactcatctcgtttctcgtatcccatacccaagatctcccaggctgcagagaggatccgaggtctgtatacataaacacataatttaggttttcaccctgtcgtataatatagtctcctcccatcaaaacaagaaacaaaacacgctccgaagccaatcgctgaaatcatcacacgctacctgtgcccgagtgaacctgactctgggaccgaactcaaaaaaagacagtgaaaaagatacaaaaaacagtaaagtgttgcgtgacctatcgttgcacgctagtatttcaaggccattgctggcacgtatttttcaagaagaaaaaaggatgtcaaaataaaaagggcagatcaagcaacaattcccagcaggaattgtaagaaatgcaagaaatgcaagaaaggtagaagaaaaagtgacaagaaatatggtcttgttgagatcacgggactgacccggaaatcaggagtggaaaataccctcctccttgacggggttatcataaccgtgaccttggaccatgcgacggaagtcccgcacaaccttttcaggcacgcggtcccacatcaaagatctagaatacacattcgacgacaatgcggaatgaatacgactctgctgcgcggcggtatcccgcatcgcagcaaacgcctgctgcagggtagatggctgctggggcttgaagtttccgttgtcattctcaaacgttgtcagggagttgtaatggtcagcgttcatcgagaacacctgatcgcgctgttgctgctctgtcggcatgacgagcgtgttatgcaactggtcgagacttgagggcacgggttgcgcagagctcatctgcgccatctccatgccactgatagttgccggcgcgggtccggttgctgttccatggttggaatgagagttagttagctcgtggccagacgacgaggctaacactgctttcagcacattggctgactccgcccggtactcctcggagagttggggcagggagtttcccgggagggacgtattgtttgaggcgaagaaggcaccgacaagcaggaacatgtagaaggcgttccagctgatcggcaggtctgatccattgttggatttctccgggaccttgacctgagcatggggagtttggacacagtctgattgcaggagaggtcccgtgaccgtcgagaagtcatcccatgagtggttttccatggtcgggttctcgaagccggtgaattcaccggtcatgatttcttggacgggcttgacgctgcgctccagctgtttgtttctctcctccagcatgttgttcctcttcaacaggttggcggtctcccgcgtgtgcctgagaatagtttcatctttctccatgtcctggcgttggatgtgctcggtcaactgcctgttgtaggcagtcaattggtgattctcgtaatcctggttcttcattgcgctttgcatgttctggattttctcctccagttgcgcgagctttttagcctgttccgcgataatttcgtccttcaccttgagcttttcgatattaccctcggcttccttcttcttgcgttgacgggattgcaggctattgtgataaggttaacatgtgatccagctcaacgcatcaatctcaacttacgctgcatcacgattccgcagcagtcgtttgatcgacttgaggtccttcttcttctcctcgtccacgcagttccggatcgcgtcgtcgatgttggccaaggtgagttcggcggagatttcaatgcgggaattcctcttccgaatcccatctcctcgccgcaacggtatggccatccggtaatccgggctctttctcgcttgcaactccgcctcggccagatccattggcgccggcatccagccctggctggattgcggtgacatgacgacgctgccagaagccgcaaatggcatacctccacggtacgacatggggttcatgggcatcgtgcaaacgggtccaaccgcaccaccggagaaaggaccgacggcaccctggtctccattggaagcatactgatcatagcccacggtcggggtacatgagcctgaatccgtacgcggcatgggccacgctgcctgcgagcaactttgctggtaggaagatggttgcgggccgtcaattggcatgaacgaggcacccgagttcatcatggtatgcccgagttgcgaatgcgaattggaattggaatttgactgagactggctgctggtatttgagtaattggaccagacggaatcccgatgtgagtaggcatctggggcgtcgtaggaggtgcggcggttgtcggggtggtcttcggaattcggatcaaggatcctgtcatccaacacgctcatctcgtcgtcttccggggtcacgtctaacgttgatggtgattgttggtagaattcagactggaaatattgtgccatcatgaagaggcggtgtgtgtgagaaacggtggagtggggctggggaagatgctggtttatagagaaaatggtatagaggcaaaccacccaagggagaagataatagtcgggaatcaatatgaagatgacatataatagtaaagaggggggaaatatgctgtgatctagttccgggggggaggcaggatatgtatgagccgatgcagcagtgctcgtgcggttcgatattgtacccacaggtaccgagtaccgatgtaggtgatggaggatggcctgtcgatcaagtacctagtactcatcccgccgtctacgcgggagcgcgagtgtggcccccggaacagcatctccgttattggctgcattgttttgcttgggcagacctgcatttgttgatgttcgactattttggttggtattttggttattcttgaattttcggctgggttttattttatttctcattggaaggttttttggtatattttggttttattatgatcagtctcaatggtcatgctggcggggataattgactacattggtaccaaggatgggaaatgatatcgtatacaacatagtgcttttccttcctcttctctccgtaaacccggagccaccaacaatcctaagtgggggaaggagtcttccttctctttcgggcttatcgataaacgatagcctatcgatcgatcctcgttccgccggccgtagacatccctgtcgtggggaggatatggtctgtgctataccttattcacggcgcttaggtagaatacccaatgctacttcggacttcacctgcacgactacctgaaactactgtttgaaagtatatttttgtacccccatgtactaaactgatcccctttgaatggtcagatgtccagtctaactgtcatccttctttctatccgccgctaacagccaatcattcccgagtcagtgtgacggcttctttgggctgccatccatggcgccttggatgttttgctttttttctttgttgtgctccttattccgattcattatagttcccttccttcgtatagtctaggatgagtctctatagaatgaatctttgggacgggctcggcccgctgatccactgttgggccgaccatggatgagaaaagaaggaaaaaaaaataggaaagcacggatgtcatgcactgatcactcgtcccatccagatgacaacctccccctccaaaaccaaattccccgaatggagctaccctggaggttaaggctcgatagcttagagtaagagcttgggtcgaaaatctcacacacctgatcttgctcaatcttgccgtgatctacttgcagctctctctgcagctcccatatggctgcagcagcctcctttccaactcttctgagctcacagaccacatttaatccatgatcgactatgcggagtgcaggggacatgatgccatcgtattgacgggtgccttccggcttgctgagctgcgggggggatatcctaatctaccactattattaccaatatactaacatctccaacttcgaccacgattcaccatgagctgtcattgagctgtctcttctttttttctggctttcccccacaattcaatcagtccccatctctagccttgcccaaagcgtagaccgggttcctgtcagttcaattccccggagcacacgccttcggcggcagccgctgagtctgttcacaatctatacatagcacacagcacatatcctgtgccagtgataggcctgtcacctgggcggcaacttcgcgggtgggcaacttagcccggataagatctggcggtgaaaaagctgagtctgtccaatggagatccagtatgccaccggtcaagcagtccacccgtggacgggttcactgctacattagtcataaacagggaaatattttcagtcaaggtcccccggcggcattcttgttttttactagctcatgacgcttccaccaaatgcagtatagtcttctagaagccggtcccagtatcatagtcctttgcgtatacaccggtagattcagcacccgtaccttccctattgcgacactggcatattcgcccttcctgcggtgaagctgaaaccaatgttttgccatgtgactcggaatgaaactggtgatctaccttctctgaatgagctagaaggcagtggcaggtccacggtccaccactccacttgcattctaatatttatgtagctaatggtccacttctttcacgctgcatacaacttggaatacgacgtacactgtacgtgcccaagggtctgtaaaacatctccccggtgcaagctagccggatacgatctcaaagcctcactttgaagtggtacctgcctgatatgccgtgcacagggtacattgggcacatcggatgggagtaagccattgccttggaaactggatgtgactgggccactagctgctcactgctagccctcttttatgctccacatgccggattggggactcgttggcgtttttcatgaatgtagtctgcctatcggggaattcagcttttcttggacccgtcgggggaagcatatttgatctctgtgccgaggatcctccttcaccggttgaaatgactcattctgtagtagggcgagagatgaatgaaaggtcttgagagtttctgtcgcttggtgcggttatgaccagctaacacgtcgtcggaatgagtttcaagcaggtggaccaacatacaggaatcccaatattgagacagagaagctattactcagtacttccgctagactgagtcactatctctttttggctattctcgtccgatagactggctttctgctactattcttgtccgaaggattcatattcttttgttggatgacgtttccaattttgcttagagcagattttctatcctgcactaaagcccaacagtcaattccaacgtagtagaacaattagtcttccaattcaacaattcaacaaagccgaaggaccaaaaccaacacaagatggtgttggtagacaagcccatatgcgtggcttgacctagccgccgacgcttccaagtgttggtgatacgcagagtttgcaggatgtcaagagaagagtctaggattatgtctagctatagcccccgacaatagatcaattggttctcaggaattacattctagattgaccttgacaattgctcatttagacaaggaagtgcttgacttcaacccgtacattatcaccatctcgacttgctcaatcgagacatgccgcggcgttgatcacaacgttacatctttgtaaatgttttaaacttgcattccaactattgtctatgactgtactcttccgctttccatttgaggtccaaatagcatccttgctgcctagcactaggtgctatttgatatacccctccatgtctatacttggagggcactgatatatatattgatcacatagtcaaaatactacaacacactacattgaaaacaaagtatacaagaaagattctaggctctgtctgtcttgctccttatttccaatattgctttcgtggctagcaagtttcacaggcttggatcatccttgtaggtctcggaaggatatcctggggtgcagatttcaatattgcgcgctcctataacagtctatctatatttcaagcatcatgcatagcgaggcttatccatacctctacggtcacacaacctcatacttcatgtcaccagtcaacaggacatgggccctgcagttgttgctatcactgtcacatggctcggtgattgccgaagtactatactcaacctgacgtcgacatgtgcaactatggtcagcagacatagaatttaagaggcttagtacacatgcaataagaaacttcaagataacttatttcaatttttttcaatttcttctcaactgaatgctatcgacatgttttcggggtatgggcaaaaagaatgaaaagcaagaaagacaactatccaatcaactacaaatgccagaatttaggatttagaagcggataaagtcttgctgctgcgacaactcgccgctgtccacaccttcgatcagttcttcgggggagtcgtcgaatgtatccgagtcaacgtcgtccgaatcaatagcgtcatagttttcttcctcgctagactgatcagactcatcttcacccaaatcagctttgctagcagcagccgcagcagccttgcggatctggcccgcgcggtcaacatgcggcagctggcagcgctttttgtggcaggcgccggtattggcatagtctgggcactcgtggacgtgcttctcttcgcaggcgtcgcccttttcgcagtatcctagggttgcaaaggcgcggcagacgggggcaccgggtgtcacgcggacgtgggcgtagcgacattccgggttggcgcagcgtcctctaaggaaatgcatacaagtgggggagcgatggggcgaaggctcatgggatagatcacagctactacctgcggcacatttgcctgtctggaggaagtccttgcacatagcgaccttactagggtcatggacgaattggcaggtcgggcctttgtagcaagtgcctagaaaattagacgtattagtttttgagcatacttatagggtagagcatagaagtatggcccgtcggaaaacaaaataccggttgttgtaaatcttttgcaaagctcatcgcgcttcttaacagtatgattcctattgcaaggttagtataaaggtaaccatcattaaaaccaagactcacttcttcatagccacagcaccgagacggtggaggtttccgtttttgcttcgcacaaaggacacatcggcaactgtgacgcgcttaggcgtactgttggcagtactagggtcatctatgaagggtaagccaattcgagaggaagagcgaagggtgcacgcactcgaaatacgaatcagtttgcttccgccatttgcgaccctgaaaggaacatcattgacaagaatctgatggccagctgcaggatttgcagcggtggagaccactgcaccagcacctggaccctgtgcatatcgaagtactttcgctttttcatactctgtttttttctgttctctaagcttgcgcgttcgttccatatcctttgtcctgtcctgtgttttccgatcgtagacagcagggttgatcagctgcatgtggcgatcgtgcttcacgacccaaccattgctagaagatggtgtcgaaaccgccgcgctgtcgttcgcactactcggggcgggtgatgagttggcgctaggggtcgaaccagcgcccgcggtgttcaaaaccagcgtgcggtgtcggtgcggagcagctgctccacgacgtcctcgaccgcgtcccctgtagtatggggcccatcctgtgtgagaagggacatggcgagacacatattgagactggtagttagctggctgggtctcttgcgtcttgtggcggtttatttggccttttcatgttagctttgtcttgacggtgaactgatactgagcgcacctgcaagctgaccgatcttggccaggagatcgtcgttttcgctcatggtgactaactgaagctagatagggtaagtgggtggcagaccggatatctgagattttttcagattaagatcagaagctgggtggtatttcagaagaagttctgagccggtgatgcggaggaagcagcaaagacgcgctcatttagcgttggtgtgattctgggagggtagtttgtactgtttgcatgggttaggtgccttaggcatgaatacaaagtggcgaggaggtccgtgcccgggatgagaacgtcaccaaccaccttgaacagtacgaaggagacaggaaaacacgtcttcgatgcttgtgcagttacatgaggccaaaaaaggactcgctttagcattagaacctaactttgaccttaccggagagcagctccacgtccaacttgacaatcaccaacgaattactccgtaccccgcgtacaagtacagaaaagttaagaagaaatagatatagtccaataatagatcagaggcttgttaaatacactcgatgtccacaccagggatgatcaagcaatgggcaagctaaggtcttgctgaaaatcatccccacatgctgccgctatagttcgcaatgtgtatactgttttatcacacgcctactaggagatctgaagtttacaagaaagccaatcgaaggcgtttagaagtcgataatattgggcaagaattactggctcgacgtgcttacgccaataaccaacaagaaatgcatacgattctggtgagacagcttggtcaaattctcagaggctggtcactgcgaatcctaaagggatttgtcaagacatcaatcgaagaaactgtttgggaccaaatcaatgattgtgtggaacccatttgtcatttcatttcattttattttcgaattgaaccaggactcccggtctttccttgaaagccttaacgccaggacctgcttatgcaatatatcgaagccgttatctgggtgtatttgtttaaacgttttcaaattgaacatcgtcctgatctattccagaagctggatcgtcctctgactcgtaaggatcatcggctcctggtggcaactctgctttagcattgtccatcgcattagagtactgactgtgggttgcctcgggcttcagttcccaggtcatagcgaaatcaccagccttgacaaggtgtgcaaccatctccaaagtctgcttgagatatgcctccggctgtgccaatcgggctttgagtgtcttaaagggccagtatttgaattcgcggaagcattggaagataagatccagaagctcgttttgtggcatgcgggtggacttgttctcttgggatttccctttggaaggtcgtgtggcttgctgtagacgaagtgagtaatctagcctaagaaggaagggaacttccaaagacttaccacaaattgacccctttcggtgggaagagcatggcgcgcctggatgatcttcccgggaatcttatcaatgaagacagtttccttgcgaggtttcagagcttccagcgctcgcttctcggatatccgtcggaattcttcattctccacaggaaggcaattgaattcttcactgaccgcgccggcgagggcagtgtgttctaagaattgtgagcaaatacaactcgccaggtatgcagtgggacatacttggtatcgtctttcgcacataaggctcccatcttttgccctgttcccgccgcttcgcttcacgtttttgggcttcgtatagaaccgagcgcgtttcgccgaatgtagccatgcggttctcaacaccggggatgtccttctcggtgaatatgtacgtattgtgggtgaggtgtgatccagtgcctgatgggtcgaccgtttgacgctggagtgtgtagtccttgggaatctcccgattatctgggcgatcatgtaggcgcaagctgacctggcaaacggacacatgtcagaatccgccaggcaccctgcatacgcatgtttccacttactcttttgatgtcattcggtgtcccctccactctcatagtgccaagctcaatctcctcgtcatcgtccagatgggcccagtgctcccacagcgaccgaggcagacgggagagccacacattctgacctgcttgtgaaaagtctaaatccccagcatcttcatagaggtcttcttcatcaatgtctctcagggcaatatccttgctgtcggggtcttgtttgaagtacgggcgatccgggtcttgcttgacctgcgccatactggatgtgaggtggctcgaggacagtcggaatataggggaattgacggtgtgtcaaatgcgaccgtcaatgcgctactgaatttatcgggagagaaagtggtggatgtggtgatcagcgcgttcttgagcgatgaagtccgcgccacccaagtctggagctattcactcaacctgatgtggtaggcggtgagagctagcttctttatatatgacgacgtctgaccgttcagtattagagtgcataactagctagtaattcatatgctgaattgtgctccgaccatgaatgtggaattacttaggtggtattcttaggaatttaactgagcgaaatatagaaccattcttttgtcctaccagtgtcataacaatcatcatactcgacaaccaacctgctatgttgtaccaataacacgtctctactgtgagtagtggctattcgtatactacgaagatatataagccggttcctgcttgcatctttctcgtaatttctttattataacgtgtgtgattatgaaaaatggcgcccttgtactatgaaacatcgtttcgtcgcagtcttcacagttcaccttttcttgaattggagacgtacatctatcctcatttataaaaatcaaggctattcaagtccaattcttcaatggagtcattcaagccaaaccattcaatgaagtcgttcaagtccaacccttcaatgaagtcattcaagttcgcgaatagggatttgaaggatgaatcggcacaggtgtgggcttgaatgtacccataatgattttgatagtgggccgaggtactccattctggtgattcaaacgccaataccttctgtatgagatctctgtgactgagattcaggaaaggagccgcaggccttggcgaaagaagattacttgactgcatctgaatagtaagggctccaagcatgattgacctgcactcaaactcacagccccgactgccactcaggagggcatcgcgtatttcatgaagtcggaaaactgagtgattgatggcctcatgtctccgtttgttcattaatcctgcgatttaattagatactaagcagcttcagaatttgtctggccttaccgatgacctcatgagagatcggaagcccccaaccatgaacataagttttactcaatgacatgacagccgatgttgtctctttgaactgggaggagagctggaaaaaccaggaaacccataaccacaaaatcaaattccgagaatatgtcataggaatcttttcctccagattattgatccatatgtccgtcatgctatagacagattccttgcattcatagtaatccgctatgacagcaactttggcgagcatttcaagggttagctttcgcggtattcggcggtatttaccatgaatagcatgaagtagaatcaagagtgctccgatgtcccagctctctgcagtaatctccactgagcctttttgcagataaatagtgctttccttccaacccccagtgaggatccttttgaatactgaggacgcaaatattaaatgcttcgcagagacttgaatcttgacaagcggttcatagacttgctcttcagcaggttctccggcagcaggttcttcggcagcagggtcttcggcagcagggtcttcggcagcaggttcttcggcagcaggttcttcggcaacagggtcttcggcagcagggtcttcagcagcaggttcttcgatcggtggtgatgcaggagatgatactggctcagaagaggaccgaatggctctcaatccttttctagatttcttcttcttcttttgcttccctgaataggttggtgggggtttgatcgcttctgcaggactctggagagaatgatcggaatatgaaacggtcatgccagctaccgtatctccaggcgcttgtgcaaaaggagagtttgcatcacgcaatattatgatcacttcaccgtctggatctatgatatgagttggttggtccatcatgtttatcaaatagactgagagatgaagtttctcttcgtaaaaggcagacaaaattggagactttccggggataggagaagatagaaggaggaggagattacgagagaagtcgggcagcaggtgagaaggtaggtatgcccaaccgacaatgagggggagatactgatgcacgtaggcgtctaggaatgaattgttgagaccctttctgccttaggttgataggacctgctccctaccttgtttgatcttacctttcttaatgaacacacacatacagcctatgatttcctttcccattatagatgctgatgatggatctcactaccgtcatcaagatctgtaactagcgtcatagagataaaggaatagagcaacacaggcctgaaagacacaaaggcagaaaaaaaagcctaccaacatacatgaagacagtcaaatgcctttgataccaaccataacagatctgtatcttggttttcttatggtctaatggtaaaatgtgctatattatgtttcacaatacagatagtttactcccaccatgcagctatccggttaaggtaattaacggcagtctttctaaccgccagtgtgccatatcagggtttgcctgcagtaatatatagtttgtaatataagtattttatatcccggaatacttctataaataagtcgaacattcaagtctaatcctcgatatgcttgaagtcttaccatctgaaatcttgatgcgaaaattctctcattccatctgtagttaaatatttatttcaactatattgcgattgcattgtaaaaatattgttgagcctcaaagtatcgtttgcaaaggtatggtactttactgaaccgccttgcactgcttaagcttggaacccatagaattatccacggcctaataataaaaatgtgtcaacctcaagcagttagtctacagcgtcaacatgttaattggtacttttcatctgggtggcagggtttcagtggtttcattgcggggcggatttagctggcgcttagctgtcgatcaccttctgctctataataaggtgcctgcttttcttaacagacgtattattactctaggattattttcttaacaagtctactattactcacatgacatcagtccaatcacgtattcagtaagactatcagcagacatggaactcgaaatgcgtccaagggcttcggggccactcagaatcctctcacttggtttgtttttttaatccccttggatagaaaatgagggttaataatatgcctcagatggtggtggcattcggggaatctcgagtctactgatcctagaaaggatcatggaaaggatccgcgatgttcatcatcttgattataccccacgcccgtgtgaccatttcgacttgatcgggggtacaagcactggagggtatgtctgtgtgtggtacatacagggttaatgtactaatatactataaggatcatcgctattatgctgggtcggctgggaatgaccgtggatgaatgcattcgagcataccgaaaggtcgcggagcgtgcttttactcgcaaggcacatgccattattccagcacggcccaggggagctttctctgcgcgcgcactgcaggaggctatcaaacaggtagttcgggagttctgcacagaaaaagaatgcgtggaacgtcggcgcaatggtctctctataactgactgtcaacactctgatctaccgtttcgtgagcagacatgcaccaaaacgtatgtagctatttaatgcagagattagattagtattgacaaataacagggttgttcttgcggttacgaaagtgaatattgacgcgggacctacgctctttcgcacatacgacaaatccactgcgcttgatggctgcgctatttgggaagttgcccgcgctacctcagctgcatccacgctcttcaagtcaattagacttggtcgagacaacatcgagtacattgatgcaggattcggctataacaacccatgcgaacagcttattgcagaagctaagaaggtgttccctggacgtagcgatatgcagactctgagtatcggaaccggcattggagatgtggtcggcataaaaaatgggcgcctgtcaatcattggtgcactgaagaggatgactacgtcccccaacagggtaaacaccaacatggaagactaccatggcgacagcggccagtattttcgattcaatgtgcaacatggccttggagatatctctttgtcagactggaagcaggctagcaggatatctgcatacacaagcatttatctctccgagaagtccaaggatatcgagaaatatgtgaagacgtatggggcaaggagtcaacaaaatgagctgaatgaacctcagtttacgaagattctaatagtcgaccctgttcaaaaagttgacgtggttctaggcaagctaaaggcctaccatatgatcccctttgttgcaaatgaagacttcactggacgtgagattgtactaagcaggctgcaagaaaggctctttcttcaaaagaccgcccgtaaagtggccttgtacggaatcggaggcattggcaaaacccaggttgccttgcactttgcctattgggtaaagaacaacatgccacagtattcaatattttggatcccggcattcagcgaagccagctttgagcaagcgtgtacgggtattgtgagagacattggtatccagagaataaagcaagatgaaaacgatatggagatggttcgtcggtatcttagctccaaggaagctgggccgtggctcttcattgtggacaatgcagacgattacgacatattatttggaagcgacggtgtgcgaggtcggctttgcaaatactttccagctagtgacaccggcgttatcttgcttaccacccggttcagtcgggtggcggaatgtttcacgtcacagagagatacaatccaactcttgccaatggaagcaaatgaagcgattgctttgttcgagaaactcgtggcaaatactctcatccacagtcgaaagatgacagaaaagctactcgaagagctcagctggctgcctttggctatcaagcaggcagcttcctacattgaattcaccaatgtatcagtttcacgttatctcgatcttatgcatggtacagacgaagacaaagaaacccccgcgagttgtcattttcatgatgatactcgctacccgcagctgcagaattctattgctcaaatatggcgtatctcattcgaaaagatcaaaaggtcagatcctatcgccgctgatatactgcagttcatgtcttgcattgcgccgaaagccattccacggtctctcctgcctttgtacaaatcggaagcgcaaactgaatccgcaatcaatacgctatgtgaatatgcattggtgaccagagggacagatggagtcacgcttgaaattcacgatatagttcagctcgcaacgctatggtggattgaccaaaaaggcgaagcgttagagacaaccaggaaggtcacgcagcgtatggtcaagacattctcaccgcggggccagaccaatgaacatacgaggagggcgtacgtacctcatgctcttgaacttcttcgtaagacagagggtcgagatatacacgaacggtatgagctcatcttaaaagttgtgtcctgcctcatagatgatggtagggtggaaacggccatggaattactgaaggaaaaggccaaatgggaccaaacccgccattgtgaagaacatccctctgggctgagacctcaaacatttctcactggggcatatgcagcagatgggcagacagaaaaggccatgaagctgagcgagtatatcgccccggcgaaagagagaggaatgcaagaagctcactctgagcaagtgcttccagaatggtttccagcgcagacgagcaagctcagaaagcagcagagctcttcggatattttggcgagacggaattatctgagacagcagagaaatcagtcagcaaagcgcgccctaacctacgagagtgtcagcctcaactcgaaataccttgtggacagctcgggagattacgcgggcgagagagtcactcaggcatgtggttatgatcgggcagagacattccgcccaagagggattcatctctactagaatctcactgggaaatagtatttttgtatgacagaaggagcctatataccacttggaaaaatggggatttgtttgtttggcgctaactaaaggcttcatttaaaccacccaaaaatatggccatacatgaatttgtatggtgctaaaagcttcattttcatagggtcatcggacctggttattccgtgccggcatagtcactgtaaatagatacagaaaagcggtaaattcgggcattaaagcctcaatatcttgaaaatgcccttcgtagataagactaaaacacttatgtaggtgtgatacgactaagaaaccaactgaaaaaagttgcagggttgcacatcaagaattctgtctagctatctaatagcaactggcccgcagcagcttcttaggtagcacactgatcatatttctccccaagtcccttcaaaacgaccttcaccaagccacctaatgtacctgctcggttgatttccactgtaggaatctccacacccagagacctccgtagccaattcctaacctctatagccatgagggagtcaactgccatgcccgccattgcttcaatgtcatctgcagaatctgatccctgatcctgcatctgccctgtaagattatggctgataaatttgcctagttccttcatcaaggcgacctcagtctctctcttccccgtcagcgagggatcagcttgtatctgggcaaggagggcctttaacgcatttgcatgagaggattgatccccaccactgccagcactggtagactcgaggttggggtagatcaaaaaacgagcgtcgcgtccaccgaggaagatttccttggggacatcaccgcggcgcctcgtgtgcgcaagtcccattgcaattgcaccactcgcattagaatcactgactggggatatattgatcgccgcggcgagtccatcaatcacttcagcttcatggagcacatgcagcgcgattgactgtactctttgaaggaatcgggagctccgacttgcggcacctacatctccaaccaccccgaggtggaaaatagaggaagggagcccctgctgtcgtcgataccgggtgaatgcttccaaaaatgtagttgctgctgcataattggcctggccggtgttaccacataccccggcaattgagccaaacacgacgaagaaatcgagtgagtactgcaatgtggcatgatgcaggttccaggttccagtgactttcggagccaacgcagcctcccactcctcgtggctcatctgcaggaacagtcgatcctagatgctatattaggaatggcatttaggagaaagggagaaaaacacttaccttcaagtcaactgccatttggaggacaccaacaaggggccgcgtgcatgtggcaacagcccgcttcacagcttcaagatcggtcacattgcctagcacacagctaacatgacaaccttgcgcctcaagctccccgataaatgcttgatcctcctcagatttgccagctgatcgcgagaggaagatgagctctcgcgcaccctgctcgaccatccatgttgatacggatcgcccaacaccaccaagcccgccaatcagaagataagcggcgtctgatcggaatgtcgggaatcttttgacgataggaggaggcaaactgtccacggaggatggcatacgcaccaagatcttacctaagtgggtgcctgcctgcatatacctaaatgcactgacaatgtcgaccgcatcaaagactttgacaggatggataggtccgattttcccttgacgataccaatctgaaaatgttgccagggtgctgtatgtgttagttcagcttttgttcactcaaggctcatctgagacaaaccttttgagaatctccggggtttccttgcaaacttgtgcgaggtcaacaccgaaaaatcctcggttagcttcgaaaagactcatattaagtattccgtgacttatgaagtcacgttttccgagttcaaccatccgtccgaactttgcgacacattcccacgaagcgtgcagtaagtttcccgacaaagaattgagtactacatcaactccccgtccagcggtggcacgcattaggtccggttggaaggaagtgttgcgagagttgaatatccgttctcgaggtaaaccaaaatgctccatcaaatgggctacctttttatcgttgccgaccgtggtatatatctatattgacttattattagctccacataaaaaaaacgataacgtgaggttgacctacctcggcaccaacagctcggcatacttgcagagcggctagcccgaccccgccacatgcggagtggatgagaacggactgttttcatgtcagtaactaccaatagtcgagttaaatggtgactcgcctggcccttcttcaaagcaccaatctcaagtagtgaatagagaacagtcacataggctgttaacatcgtggccgcatctgccattgacaacccctgcggtagcttgatacaagcttcttgaggcacaacaacgtttgagaccagaaccccagaatgcatcaagatgacacggtctcccaccctgatatccgtcacatcaggtccaacttgaagcacaataccgctgccttcgaggccgagatcttctttgtttccgaaaaagcccattgcaaccatcatatcctagaatatattgatcaacgatatgcaaggttatcttgggcgcagaaaacttaccttgaagttcagtcctacgtagtccatctcaacttcaacatgcccctcattcaactcatatgatggctctttctcggcccagtgtattgtatccagtagcccgtacgtcgtgagagttagctttcgggacgcatctgatcgaggtggacttgcgagctgctcgacgagaggtgtccagtggtaccggccgaccttaatctcgccttcatgcaatgcaaactcatactctggataaggaagggagtgcgcgcgggatctttgtatcttctcgcacacttgaattacggcctttgcacccgctgcatcccatgtggaaatctccagaattgagagatcaattaaaagctctgatcgtaaagtgcgggcgaacccatggatgaaaccgaacagtggatctgagcaggtgcgggacgttgactgcgtgacccacaggattcggcattcttgcacttgctcaatgtaccgttggaataccccatagtcattcttcggcaagcaacctattgcagctccttcaagatctagcagagacacaatgaatttgcctttgggtgggatttcgtgcaaggtagtccagtgagtggtatagcctttgtcgcggaatagcaattcgacatcactcgcccactgggacgggctagaatttcccgtgagcaaccagatatcggtaggaatggatatatcgtctaccggccgtgacaccatgctggcagatatatgatatggcggcttttgatcataagctgttacatctgctccggtgaaacctgctgctcgtagctcccgatcccaccgctcgggtgagatgtacggttgctctgctcgaccatcatccacccctagccaccagccggtaaatacaccctaaaatatgtaagaaaaccagatattggtataaggaaaatttggtacctaccatggtgaaatttgcaattaagatttctgtatcctagtcagtttagtcatctaagctggagggatttgacgtacccgggctaatctcatggagtaagaagcgaccggtgggcttcagaagacaatgcacatgagtgagtgcggtatgaagactgggggtagcgtggagaacctggtagagaatgtgaattcaacgttattgggttgaggcatactagtcaaatacccacattggaagcgatgatcaagtcaaagctatgagggtcaaacccttgttcgaggggatctagggtgatatcaagaactttgtattcaatgcattgttcatgaccgaatctctcggttgctgcagccataaaaccagaagagatatcagtaaaaacatactggctatacatgcgctccccactcgtggacttgagaagctctagagccaaggcagttgcagacccggtgcctgcaccgatctcaagtattcgtaggcctgggttggaatgacagagcgacggtaggaacggctcccaaccggcatactgtgtgtgcgcagcatggaattggtgcagcagattgtccttcatgaggacctccaatgggctactttctccagatataaaggctttgcagttatcgaagacaacctgcatgcaatccgcaagtggagcatcaaaggtaaacttggtttcggctaacactttccgtgtcatttcctgtctgtctgccgagcttagcaatgcccactgagatgaatctgggtagattgattgttgtccactttttttgatattagaagctgcgtccatgatgaatttcttccactttacgaaatgtgatgatcttggctcgaaatcccgaatttgctccgcggtctccagaacaaaaagcgcagatagctgacccaaggctttaatattcatagcctgtgatgtataatcgtgtggcgtagacaaaagtgctgatgattgcaagaaatcaatatccgatttccactcaagatgggttactgagcccgcgggtccagtttcagaatctatattatcattttccaaggcaaaaagataagctccttggatggagagcaccacccgatcgtcaagcatggcaacggcatcgcccaattggccatcccttgtaccgctcttggtccgggcacttgctggcataggtggaccacctggtccgacgaacaaggaatctatcatagccgggacataaattgttgtgaggtgtcgcaacaagccctgagaacaggccacacccatgagttggagacattgatcaatcgccgtgggatgaagcgaatacctgctcccaggcagcccacgattacccagaatggtcgcagttgccctcggtccagtaggatcggctgtaatcttttccaagccctggaactgagggccgtaatctataccgctcctttgaagtactcggtacacactttctgatggcaaagctcgcttataggaagatattgggaatggctctgggggatgatcggacccggctcttacttgaccctgacaatgcatcgtccatctttctccatcatgggccatgattttgaaactataccagccggatggaaccctgtcagccacttcgaccggactgaggctagtcacgatctcgatttggtcttcctcatggaacagtagtggtgttataaatgtcgcattgcgcactgaataactatcgttgtcaggatacagctgctggactgcctcacctaccatagcgacgaacccagcgccagggaatgtgacggccccttggattacatgatccaaaagccagggcacgtcgtccagcgtgaccagattacgccaagaaggctcatgatcagtcgtatcgacgacccgcgagccgaggatttcatgatgcggaaacttccgatgcctccactccctactcagtcgactctcactccaataggagcgatcatgttgccaaggataaggtggaagatctgtcagcgtattcccgggctcaattaggctcgacaaattgaatcctacgccgttcgcataggcctgtcccgctgtccggagtagctggctttggacatcctcgtcatacctaaataaggtgggaatatagactggtgacttcgttgcaagagtccggaggatttgtcgcagaggggcggcgagggctgaatgcggcccgacttctaggaagactggggttccactagtaggtaggctttggatagcctcggtgaacaataccggtgattccagattctgtcgccaatatgatgcatctagtttgcgagggtcggtgatagtgttgctagtcacactagaacagaaaggaagcatttcctgctcatattcgatgtggctagagatacaatgttcatattcagagccaatctgtttcatctggtctgcaaataatgtaagcgcaagggtaaaagcgcagggcacagggggggtttaccagaatgataggcgattttaactgtaagccgccggcagagtgtatctgagtttgctgtcttgatgtttttggtcacatcgtcaaccgagtctttatcccctgacaaggtgacactatgcggactattgtggcaggctacaaccactcctggtgtcaggtacagtgccacttcgtccggggaaaggccaacggccaccatagcgcctaagccttctagcggtttagcgactttgcctcgatagtatgctataacgatagcacttctcatagaaatagctctggcagcatatgcggccacaatctctccgcttgaatgcccgacaactctagatggctcgattccccagccccgaagaatatttactagtccaatttgaagcgcaacacagagaggctgagagaactcggcttcgtggactcgagaaattgaactctcttggcttagttcatctggaaggtacgttagtgaaaatattctcgtaacttcaggggtgaagccctctttctgaccatataataaccaattcgggggatcaggtagctgctgcaatgcttcatccattcttttgatatcttccttgaatgttgggaattcagacaagagctttagccccattccgggccattgagcaccctgacctgtgaacacgaaggtgacatttggggaactggtgttaagaattgaaaatgccgcatcatctatcgctggattactcggctgcaccacagcgaaagcccggtgggaaagatgtgatcttcgcgcagccaaagtgaacgaaagatcatgcaggcggtctgagtgattctttacatagtcggtggtctggctgatacgcttgcgaagagtgtctgctgtgtgtgcagacaaaactaggagctgagggctggaaagcccgagcgatgtgggttgggactttggagagaccgaagaggcggactccagaatagcgtgggcattggatccgccaataccgaacgaatttacgctaatcctttcgggcctgccagcaggccacggggtcggctctagagggacatgaatatctgcctcggtgaatggaatttggggattcggcgttttgaaatggatattgggtgcgatggtcctgtgttcaagtgacaagattgatttgatgatgctagtgatgcctgaggcaccctccgagtgaccgacatttggtttgacctggtgtacaacatcagtaagtggtttggctgtagacagttctgcaaatagggaatactaacagcactgatatatgtcgcttctcctcgggtcatctttgcaacgactgatgcttcgatgacatcgccgacggctgttccggtcccatgacattcaaaaacaggtgtttgctgtatcgcgtcaattcccgcaatccgatacgcgtgacggatcaacctctcctgagatattggacatggctgcgaaaagttaggggtcttgccgtcgtggttgctcactgtggagcggatgacggcgcggatcgcgtcgttgccccgaagcgcgtcgcgtaaaggtttgagatatatgcagttgatcccttcaccacgaccatagccatctgcctcagcatcaaaagtatgagagataccacttggtgacaaaaccatatttttagtcatggcatctgtcatggttgggctccatataaggctcgtcccgcccaccagagctgttgtgcactctccagatctgagtgcttgacaggcctcatgcaggcagaccagggacgaagagcaagctgtctggatggtcatgctgcaaggggtcagagacttttgaaataaagacagcagatcgcactcacctcggacctaggagatcaaatcgatacgacacttggtttgctaatgcataaccaccggttgcgataggaaatatctgcgtcagatgctggggatctttatgcgatatctctagccaatcttccccaaaaccgccaacaaagcaaccgattttctcgccgcgccacttagtctcccccgagttctccaggcactcccaaaccacctccagcaagagccgttgctgagggtccaggcgcgccgcctcgtggggagggacagaaaagaaggaagtgtcaaaacaacctggatcttcttgcaaaaagaatcctcttttcgttttgctcagatctccacaatcggcgctgctagacgcctctcgggagcagcgcgagggaggtgcctcacaaaagccatctcttttattcacgagcatttcccaaaattcatctccacatcgaacaccgcctggtagccgcattgccataccaatgacagcaattgggtccccaaagtcctcctcgtgatttctgcatgatgtttgtccttgtccagttattgaattcatttttggttgaatgatgaataatttgagactggatcaagatggctgcatagcagacaaagcaaaggttgaactagggttggagctctgatatcacaaggtacggccttttgacgatcgattaatttcacgagtagattggcgattaagcaaatctacacacaatatgtacctacatacccagctctgcaagatgcaggaaacacatttcctccgaaatcctccgccaccggaggaatgatatgtacctgaatggcgactaggtcgtatttccagacactgcaaagaaaggaaaccggcaggtagttccaacctgccctccgaaaacagggcattctcaaccctgttcaacgctgctccaacttagactcgcaaatgtgactgcaacacaactagtcaccgaccttctatctctatatcacttgccatattgaagtaagtatatccaaggctacgaattgaagaaaaaaacaagcagcctcattataggcgacgttcttgttggagatcttaagcttacatgagagcaaagctcagtctggccaccaggtggtggttcatcatcactgagatatattgtcacaaaggctagaacaatcagaaggaaagctcggcccaaaaaagcttacaaccctccgcatgtccaacccaatctcctaccttccgggtgttcaccgtaacccaccctcatctaggtattgggtctaatgtggcacacagaatgtacttcgtgctaaatatactgttagacacggcccagtacaacccaatgaccctcaaggggtaatgatctaggtcggttatgtcgtcgcattccgttattcggaattaagaagcgctgtggcgatctcgactatttgttccgactttattgtgtgctgatatggacggtatcttattttgctcgacgcagatccggatatttacgctttgtcaaggggtgagacacttgaagcttccttaaaactggtcagcagtgaatgattctatgccggagctggccgtgtgaacgaggcccaaaagcaagataatgatgtatcaccactctacaagataccgtggcttacaaaaatcattactggtaactgctggtgagattttgcataagtctaatccaatagtacttctatcctcatccgattgagaactatccaggccacccaggtacgttgtctggttgtcctagaaaatttcgttagtacaacaccttctatgttaagatactcacaacttctaaccaggagcagcaaccgaattttaaccaagatggacagcgaatggtttcgaggacaggtcgtcttcgtcacgggggcaactggtaacctcggcggctgcttgttatacaagctagccattcaacttccaaccgcgaagatcttcgtgctggtacggggatctgtccaaaaggcaatcgaagcatgggagcagtcaatgccagagcaagtggaggatgttatcgccacttgcaagatccaattcttcctcggtgacatgacccggcctaacctcggtctttcacccgccaacctatcacgtttacgaaatgaggtcacagtggtgatcaatactgctggtgacatcgctctctctcgggatctcgcagagactataccagtcaattgcactgctcacctgacactagctgctctactagacagtttcactcagctgcagcgtttcctccacatatcaactacatatgtctccagctttctccctgacggcgtggtcaaggagcaaatataccccctatatgaagacccggcagaggaactagagaagattctctccacaggaaaatcatcttatacgaaacaattcgcggctccctacgcactggccaaacacctggctgaatgtttgcttctgggtggtgaccacaaatttcccatccttattgtgcgaccctgtctcatatcaccagctattgcggagccctacccgctctacggcagtgatggtgcgatacctgtacattccttcctgcagatactcctaggagacgcggaatatggacctctgaagcttgagcagacactacctttccatgcagcctgcaatgagatcccagttgacctcgtggctcgtacttgtctagctcatgttgcccaaggcacaactggtgtagtccacgccagcgccgatctttatgtctcccgttcgattggggacctgctcgagcggatgcgccgccatgcaccagagggagccgctgatcaggtacaaaaggctgggattgaccatggagaggtcacggcccccgagttttacaccatgatccagcaatttgcacgagactggaagattgaatgtacgcgatctgctcacctacagcaggtggtgggtcccttgggacttgaccttggcgatcatgacccagagatattctttaaacttcgtatcgagcggctggctaagactcttctggaaaagttggaaagtgctagcgtggcaagcaacaaggtctatccgagtatctcctgaggaataatgactgggctttggtggtattattctacatttctcgtcattggttgtcgttttgtattagagttatcgcatctgtggtattttcttaacaactcatattacatggttcgaagggctttctcgcagagtcgtgctaagtctagattccctttaaagagaggaaaccaataaagcgtgtaataactacatgagcttcctattgttgagtgtggtgatatgggtgttgttgattattattctccctgagcaacggtatagaatatctcagcattcaatgttcaatgctttgtgcggactcaagtatcgagagagagcttgaggtatgaactcggggagagctcgggtgtgacttgtttggtcacggtctagtgtccttcatttgctccgatgagattgtgaccctacgatgttcgaaccgcagttcaaggaccggcaagctacatgcgaaagaaaaggtcacacaagattagtctggtggtatacgtagtatacattccaacctatgcgaggccagtggccgaatgcctgattttgtaggattgatgacttaatatgcctgaattcttccttatttccagtaccgtgcgaagatatcgaggtcttggccgagacgcagatctggtgaagaatggggggttcaaaggtgtgaatggcttcaaaaggaaaagggaaaaagggccccaaggttctttaacagcagctagcctgaaaacagtttcctcgttgccatagggtagacgcacctcgctcagtatatgagacatcagagagcctactttttagggcgggctctacataaatgaggcttgtgtggtgtgatctcagtgtcgaatttagtctagttgtaagttgcttctcttattgtagacctgtttaaatcttctttctgtgatgctctctttgtaccctaacagatgcagttttacgcctttcacaaacagacaaaagtgaagtaaaactctgcctttgcctcttcatcttccctccatttctccttgtcttcattttcatttcacttcatcatctctcgcccttcattcttatcatcctctcccctttatcctttcttctcctctccacttcttataacctaaccatgaagggttcgctcgcaaatgagccgtcgatccagtctagagtcgatgcgattatgctcactactctgctcggctaaagcgagagtacaacaatcccagtttgatcggatctactgcatctatctccagtatcaattccgtcaactccctacatttgcaatacaaattcgcgatcaagtgtgagtgggttctcgaaaaggaacaagtcacggttcgtggactattctcgtggttcagaggggctcagaacctagtcactaatatggatatcgtagaagccaaaagacttggtagggtcgagggggtgttccaatgtcctacatggtggaccacagtttgaaagaaaaggctggggcttctggcacgtctgtatacggcatcgcttcgggcagctacggtgatagtttattcatattcgttacaacgagaacctcactggcccacaacgaccaactcaatgggacgatgaggtccgcacaatgaacccgagaactggatgactcataaatggatgagaaactatatatattcgtcttgcctagagataagaatcctgattcctcagaagcgaagcttcctgcccaggttgacgcgatggttgtatcggtggaaactgtcctttcctagcctgcgtacaggtcccgagtgagtaatgcgcgaactaccacatcggcggccggagcgaacaaaaggaaagacacaccaaaaccgcagcctatccgaagccttgaaggaacccaaccttggaacgcacacactatgacagtacggccacgtggacctcgggcctatcccgaggaccggtagtcattatctgccggcgcacgtgacggagaccttcccgcaacgcggcaagattggcccatctcccgtctaacccactcatctccaccaatacccgtacgtcaataatccacacggggcacgccattcgtcggattacccatgtcgaagccaacgaataggacactccgaaaaatcaaaacagcatatcagttgcatcactatgccagagaccggtcgcgagtacatacaatggatcatcatcatcttccccagagcttacacagtgacacacacgcctaccatcaaccacggatcacattctaacggagctctggtcggaggccgtgacttctggatatagacaccgaccttgtgtcgctctgaggaatgatcaagaacgacacgtcaaaagcattcgctggtctccgagctcgagcatccgctttcacatcatttcctcttcatatgttagctatgcggccggagcaagagggttgaaaccggagctcagatatgatcctggttgagacgactgaaccgtatagcgaggggaaatcagtgatccttgtcaacgactacaaccagctaaaggcattgacttttgctcgtgctgtacaatacaacgcttccagccagagatctgacctggctgtcttttgcacacgtttcaatttacttcgtatcaccaaatgtgccattttataccttcatgctgttcttatgagtgaccctcatcaacgaagcctcttcttgggcgagaggatttggatttctctgaagctcatccatgctggtctacaaataaggttggagagatacctagttatacagtcgctatgataaggtagtgcacgttgggtgtcacgattggcacttgcgggactcgtactttcccgtttggggttgtaccgttggtcgttccttcccgttcgaaggaactcgtttgcgcagacagtcgtaccttccttctgggagaagcgagaatagggctatgcccccgaaggggtaaaaagacccatttgttatttttacgtttgttttgttttcttttccttcttcatacttgatattcgtttagcaatgcacttcttctgctagaaagaacctggcacgtaacattggggacgagaccggtgtgcagagctgggttcaacaagccatgggtcaaattatacgtctagtccaccgattgaggaccccttttcttctgtcagatgtggcgatccaggtattctaccaaatttgtatccaaacccacacaaaacttcgttccgctttattggagatggtggtctaagtccgccactcgggcataccatttattaattattgcctgtagtcaaaatggagtatcccatgtttctttcctcgttctctatgaatacctcaaattcacttatcccctagctcttaggctgtatgccatattttaaaccttccatgtccagatgagagggccatgaacctgagaagttggtatggcattgagctcctagtacctgtcatgttctcacgatctgtatgattatccctcacgtgactatagatcgttgatactttccaggtcacttggtcgcttcttgtttgctatttgcctctttcctttgttcttttgtttgttctttccttcccagggttgtttgcactcgagctaagcgagtcgttcgagttttgcatcgtttgcagtaaatccagctatataaacaggtcgattcccacttctgaacttacttcttctctctctcttcatcattttggatcaacctaaccacatccaacatgcctacctatcgtgtccatcatccatcacatgacttgtctattcttatattcgttcttcagacaacccaaccaccttctaccttccaccttccaccgtctatcgtccatcttccactttatgaggtttgtttcttatctgtgctatcacatattcttcatcttccatcattgtgttctataccttggttaatacctgatgacatgaggctgactgtactagatatgtgctcacatccacattcaatcatccacatctaaattccacttcaaccaaccatctacattcgactactacaatgcttgacctgaaagagaaggaatgaaaagaaacggtcttgatcgacagagtctccgcaggagtgtctctgaaggagacttctcgtcgggaagaggttacagcgtgtacccatttaaaggagactctcaagaccgtttgctgtggtggtaaaaaaaaaatggtcgcctcgacaagcaagcatcaacattcaaccatccacttcaatcaaccatccaaatccaagcgtctatatccaagttccacttcaaccatctaccttcaagcaaacatccacattcaatcaatcacatctaatcaatcacttccaagcatccacttccaagcatccacttccaaattctactgcagtcaataatccacttcaaccaatcatccaaattccatttcaaccatccaccttcaatcaaccatttcaagtatcctcgctcagccttactgtgacgggcttaggcagcaaacacaaaagcaaaagcaaaaaaagaaaaaaaaaagaaagacaaaagaaaacacgtcgaatcattccaatcaaccacatccaatcaaccacatccaatcaaccacatccaatcaaccacatccaatcaaccacatccaatcaaccacatccaatcaaccacatccaatcaaccacatccaatcaaccacatccaatcaaccacatccaatcaaccacatccaatcaaccacatccaatcaaccacatccaatcaaccacatccaatcaaccacatccaatcaaccacatccaatcaaccacatccaatcaaccacatccaatcaaccacatccaatcaaccacatccaatcaaccacatccaatcaaccacatccaatcaaccacatccaatcaaccacatccaatcaaccacatccaatcaaccacatccaatcaaccacatccaatcaaccacatccaatcaaccacatccaatcaaccacatccaatcaaccacatccaatcaaccacatccaatcaaccacatccaatcaaccacatccaatcaaccacatccaatcaaccacatccaatcaaccacatccaatcaaccacatccaatcaaccacatccaatcaaccacatccaatcaaccacatccaatcaaccacatccaatcaaccacatccaatcaaccacatccaatcaaccacatccaatcaaccacatccaatcaaccacatccaaattctacttcagtcaacaatccacattcaatcaactacttcgagcatccacattcagccttcctatgaccggttttggcttcatgacaattgacaggcttgctacgacagcaaacacgaaagcaaaataaagaaaaagagaagaaaagaagaattaaaacacatcgaacgatttcaaacaaccacttgaatcatctacattcaaacagccatttcaagcatccacattcagccttcctgtgacgggttttagcttcagggcaattggcaggcttgcaacaacaatacaaaaacagaaaagaaagaagaaagaaaatacctcgaatgatttcaatcaactgcttcaagatcctgcatcctaaaaaccacttcaatcagaaatcaacattaaaccatatctacaatgcttcgaccttgaagaggagaatgaaaaggaacggtcttgaaccacaagagtctcggaaggagtgtctctgaaggagacttctcgtccggaagaggttacagcatgttcatttaaaggagactttcaattgattcatttattgattctacctgagtttaattcttagctgtggtttatgcctataaaaaagactatgtaaatatgctatacaataggctgctacaagggatgttacgaatggagccattatctcttggccccaaatcctcggctttcccatccaaataaatattcagccaatcttgtcttatagtgaacgttatgcttgctatcacacttcgattatttgtacatagctaatctcaaaacagctaacacatacagaacgagccgctcaataactccatcactaacccaatactccaaaaaatgctaaagcaaaccactcagttcatcttgacctggaacaaatagcgctgtcggatctgcgcaacatcatacacaatgtactcattgtagaacaggccacggttttcagataggtgggtgctgccaatagccacatcaggcatcttcacaccctccaaagccggattcaaacatccagcatccttccatccaccaggaacgttcaagcccttgccgagtgtagcaattttgccagagttgcgtgcatcctcgccagcgttatagttgctatctacaagttccagcatgggtgcaccgagctcggcatcgcagagaagaagcaaccccatcccccggctgttgtaggcacaacagtagtttgcggatttgctcgaggtatctgctaaatacacacccttgccgaacatgtagccgttgacgggtgcttcgggcggcgcaatgcgcaagccttggctgaggataccaccgaagtttgtgctgcgagatccatgccagaggaggcggcggtcgctgtttggaatgctggcatagggggaggtgttgaagcggtcgttttcgccttggcgttcgatacggaagatgttcacgaccttgtagctcatgttgtgtgtgtcgccgcgagagttcttcaagtagttctcgagttctacgaactcggttgatttgtggtccactgggcaaggtcagtttggtgtaaaattgtacgttccgcaatttatactcacgttcggtcatctccttcatacccaggctctggaactggcgatccagcgcgtgggtgtcgtcgccttgcttggacgataccatgatttcattggcaacgtccatatccgtcagtgcttccagcaaatcaatttccttcttgatctgcgcatttgtgttcaaggttgggggccgatggcggccaaagacgtgaggaatcaaggtgaaatatcggttgctcaacgtttctatggcatcattatatgattggccatattttgcttgcgccacacttggtgtaatcatcagctcggagatctcttttagagccgagaacccgcttttcaaagtccggtcgctcagcttcccaagtggtagtttgtggacgtcataggacattgcagccaacgtgtcgagagcatcctgtttgttgaagatgaaagacatgaggttttgaagtcccttggataaggcactctctacctcgggctggtcctcttcttccttgatggttttttccttcttcaccggctcttcatcttcatcgtcctcttcatagttgcgctcaaggaatgtgtactttccgtttttaggggtatcgagccgatccacccatttcaggcctgatttgtctctgaacttcttttcataatgcttcatcgcggctcctaaactgccctctccgaggcaggctgactgcccatgctccccaactcgaccccagcgtgtccaggtaaagtactttgagtttgtaccgctcaacaactggatacgatagaatttgttggcattgttggccgaaacggtctggctcagggtggcatcccagatcagaccggcactatcaatgtaaaccttgggatctgtgccgtgtgttagtctgtgacccccacattaggtgtcgcattgaagacttacccttgattttaccaaattccatgaagccctcatcgactgggacattaatcgtctttttggttgtcttctggatgtcctttgtctttttgtcggaaccatttttgacggggtcttcagtcgcgcttcgtttcttgcttgcgggcttcttatcctcggatggtttagctttgctatctgcaccgttcttctgggtgtcttgtgtttcagcgggagccgcatccgcacctcgcttcctagtaatacgcttgttttctgcaggagcagcatctgcagtcttctgtgtgtcgtcatctggctgcgacgcctggccgaatgaatacttggactccggcaatggtttcttcgcttcggctgattcaagaagccacgaaagtggaacaatgtggcaattggcgacttgggatgcttgtttatctggtcgattggttaataagagagccccgaggtcgtacataatatcgaaacatcgccgtagctattatcatccccaatgcggtctgtcaccgtttggagcattggggtgggagtatattggccattgccaaattcacaaaatatcaaacttccgagatcgtgtatgtggtagtgtactcacatttggtagtctgcttctccacatccttctcggtggtcactagatgggtacattcatccgtgaccgctgtgctgaaagtcgcaccattcccctcaataagtgtttttaagtccactaggagtagtagagtggtcagcatacggattttggtggaggtgagctaaataagcctagcgaatagggggctcataccctgtctcaggttgggaaatgtcccgcccacggtgatgacgaggtttttgaaacttcgaggtgccataatgttgctcaattgaaaaaaaaggcaatagggccaagtaccaagagtaacaaataggaatagaaaaggtagagattgaagaggaatcaagtacgaggtgccccccaggtgatgtgtatgtcaagggaaagagctaccaggcgggagctaacacaatcgaaaatcaatcaaaaggttgcaagctgggatgaaagtacagaggaagagacagtcaagaaaacatgaagaaacaagtcgtcttttaaataaaaaaaagacgagatgttgtcaaggtttgtggcctgggggatcgggcattaatgaggctgctgcctatgggtgccttggtgctgcctgagctagccaaggcagcacacccctttttgtggagaaggcgaggctgaaaagcactggacgcttaaaggcgcaatctacgcggctaatctctacgtaaactaatttcccagttccggactacccgtacacattggcgttaagggttcttctgctggcgatgattctatgcctagttcgaatactaatgcaaaatatttggtttaagtctagatagcatgtctgattctctgcggaatctaattttatcgagattcttcaagacataaaatttccgatttctactcccaggcgttttctcttagacagaaatgcatatcaacttattgaaaaaaagatcctgatacctctcttcaaacatcaccacttacacctcagtttgcctagtttaatgggcataattggatggatgggacagaactttgacaccgtaacagtccctttcaaaagctatctgacaatccggagagaaggccggcaatgtcatccaactgttgatgactaggatattctgtgagttactgtcccaaagaacctagacatgaacttgtttccccgtaaatataaggcagagatagccagggatgccgtctttgtcgaatcaagatcatactgatcctaggctcatgactgacagatataaaggataggaatgtaagaccatcaaaaattggatattgtattgtgcaagatctctgatggttgaactatgaattgcagggaatcatatatgacaaatgatatgatctagctagatccagaaggctctattccttaggttatgacggcctgcgttctatggtagcctgcatatccaggccaggataggagatagccctaactaattgatattctgggctttttgcactgaacccgacggtataaggcataatacaggacccagctctctaatttttggtgttattgctagaacaatgataatcagctacgaaagtgccagctgaaatgggaataatagcattgagtacggagtggtagttagacatgccgggctaatcacgatacgtaattcggacttgcccttttgggacacgaccgccgctccggtggcgtactgcttgttcccgcccccgagagggaagtgccccgcaacgacctgtcaacaagatgaacgagacatacaacgtataaatcattcaaaatggagctgactttcttgattagtcgcgatggaaaaaatgccaagaggggacatgcacggcgtgcgtgtaactcttgtcgtcacaaaaaggtgtcgcgttctattctagacagccctgcaatagtcggagtcggaggttaacttttctagaaacggtgttatcacaatacctccccggagcaagtagatgatgtgacttgttcacccatcttctctggtctcgcagatagccgacatcctgcacctcaagcttcaaggcgggatcgagcagtccgaaatagatctgcatctccccgatgtgagcgatcaggtgttccctcactccagaatccggtggaacaagaggccgaatccttcattggccctaatgcagatacacctgcagaggccgatcaagaatctcgtcgttttgcgtgtgattcaaaccctatagcgactctcatggaacagaacgagtcaaggttgcagggcggtcgatcccagaaaggagatgtaggtgcatggttgggcaccgatgagagttccattgatcggggcgagacccctgactcttcacaaatattgctagggacccatgttcaccccggctgcctgccttcgaaagactgccaacaggctttgatcgacatatactttcgtcggatacatccattactgcctttacttgatgaggataacgtgcgaagccaacacagagcgggaactctcgctgcgcgactactgcaggtgatgtgtcttgtcgcagcgaaggaccggggtgcggtgcctttcctacgccttggtccggattcaaatcccctcccactggagaaatttagcaacattctgtacactgatgctatgcaaaacatctcgagaaggcctgagaaaaaagtacttgcaatacaaatattggcgcttttgtcactgcacgaatggggctccactggatccgaggattgttctttgaatctggcccaggctatccaccatgcccagaccatggggttgcatttgctgaggccagaccaacattctgatacatcttccaggaatcttttctggtgtctgtggagtctagaccgatggaacgctgctatgaatgggaggcctttaatgatacacgacggagacagaagccatggggtggacgacgttatttcaacgttccgatcgccgtttcgtgtctggcttcgaattgccgataagctgggagaagtgattcacttctaccgaccgatcataaaaagcgtggatcaaagtgaactcgatcttccctcctttgaagaccttgtggagcactgtgaggcctgggacatggctccagacctgcttggtatgaaactttccgtcgtttagttgcaacattgtctaacccctagaccgcagagtccttggagcttgtttatcattctgtgattattctgtcaacacattccagcgggttgcaaggccgatcacagccaagagtgtcaaaaatccgacaaggtcattcaattcttaccatcgcgtcgctaagtttcaatcaggatattcggaatctagtgccgtttcccatgatcggttacaccgtctcgctcgccttttcagtcacgtacaaacaactcagagaaagcaaactgacaagtgcgcgccgcacagccatttcccagatccgtttatttcatcaatttctcaaggaaatgaggactacgtggtggtcggccgctgtgatgactcgtctaggccagcgtgtgttgagcaacattcaacccactgtagaccaggaacgttccacaggcccagaaatcgatatcacccgactaaactctgcacatgaatcgactcatatatctccacggcaacttgcttccactgaggatatgcagtcgcactcggctgccgacatcccgaatgtggggagacggattaatgcaggatctccgagcacacaccctctggccggtcatcaactgggaccggaccaacctttgaatctcgaagtagacagcatgccattcttaacagcaactgaaattgaggatttcgatacttttttcggcaatttccttgatgtcggttttccaaactgctcgaatgatcaattattgctagatctcgacatggcagactttgaatttgctcctcgcggtctagcttgagaagctgcacaaagatgagaaggcagctcggtttcaagtcttgtgtaagtacacattgagtgcgctacttgatagagtcatctgatcatggtactacagaggaaatatcaaactcatgagatgtgaagagaaggctacacactcccgctagaccacatttagtatgttttccgctggccgctgtttctgaccacgccatcgtcataaatactttatctaagaatcccgatagcctagttgtggatagcggccatcggaaaagttacccgaagtagcttagtggggagttttccgctgtatgatagcttcctcgtgaagagatgttcatgtatcaatcactatagtgtatgaaaaccaatcctatgtattcttctagtatctcaaggataaaataacatgatatattacatacttcagaagtagcagtcgtgtgatcatgggaaaatgttccagtatagatcaaggaatgtacccagcatgtcagaaaaagcttctgaggaccaaccttgaaagattttcgcggcttactgtaacataggtatttagacagcattacaagaatgtcggtatttccttccgcggtgaagagctgcgcttgtaggtttgagtccttgaaatcagttcccgaccccgtttaggaatgtccgctccgttgcgcagggacgagtataaagacagacaatgtgccatgatttcccgtgtaaatttgccagacccgattcaattgagttcatattatagcttctgacttattaagctaatattccttggtctttgacgatgttccgcgaacacatcaccagctccgaattgaggtatgattgttcctgttcgcttttccgacatgatctaatgcatattccatagtcttgatcaagcatgcatttttatttcagaacagcggcatccagtgtctgttactggaaaattcaatctctcccttgcacgagtcgtatcggtcaagaatattaaagtgcggttgaggggaacattcgcaatgtgagactctctccacatacttcgtattgactatcttcttacttcgtcatagcccctttgaaggaatcttgggatcagacagccgtgaacagatcacgtttgagcgagagcagcctctagcttcttcgaaaacgctcaaatcattcgaaatgccggcaggagaccacgcatttttattcgatattccgcttcctagcaagatcctcgacacagccactggcgcaaaccatcaatatcacacatattgcgtcgaggccattgtcgagcgacgcctcaaaagcgattttgttgtctcgcagccggttagaatttaccaggtttctaatttggaaacgagctatttacgactacattgtccactggtgagtctattgcatctgatagactttgctacatagatgactgaagatattagactctcgagggccactccagccaaaatatccagtattgcctctccatcactgaccggaacgttccttttggttgcacgttccctgtggaatgctggtttgcaccgctgttgaaatatgccaagctcaacactgtcacaatcaaagtcattgagaaacaaactgcgcggttagaagctactgctgcagactcagtgcgacataacatgcagtttatcactgcagcacaaactcaaactgttctctccaagaccatggatttctctcaaggggatgagtctccggtagacggttcggaaattgaatggcggttcactacaccagtttctctgccgcgaactctcgatgcctgctcgcagagtatctcgactagacatctcaagattacgcacgagctttctatcactgctgagttctgtgatgaggcaggggctgctacagctgtggtatgtaaagaaactcaggcagagatttatgatatacagctaacaaggagttagatcacggaagttatgccatttaagattcatatggcatctaatgtgattggagaagatgcgaccattcatgggcaagatatccaactcatgcagggaagccaaagccctcctccagcttacggcgatcgtctttcggacctgatagtatcggcagcttctcaactaaatctttgtgagcattctataccagcggagacggaatatccgtgttctttgagtgagcacggtgcaagtatccataccatggagcctgctcctcgatacgaagaggtcttatagtctgtttgtttggacttttgtctacttttagtttatgagtttaatgaatctcagaataaatatcggagtcttgagcgcttcactttcacaaccccttctcattctgttaaatactatatccaacctattccgtcgacctcaagtctcactgcatcttgtaaaccaacccctcttcagctcctacttgtccatgacacagtctctcccaccctccctcgataccattaggaccggagacaccactgccaaacacaatctgcattcccggcacgctcaagtgtcgatcatccagccatttctcccactgctcgcctcttgttttgaaataggtttccgggtcgacagactcgagtatcgtgtcttgaacaccagaagtgttgtattgaacctttccaagctccgccatcgccgctctcccagcaattatctcctccatcgagtatactttctgctcattaccaacctgaacaatgacaaccttgcaggattgcaactcggcatgattcttgatcaaagaaagcgtgtctttgagagcatttccctgaccaccaaagtcgacaataacaatcttcgaaggcccgcgactaaccagccactccgcgcactcctcagaaccaacacccccatacccaaccaccttagaaggaacatcagtaggtgaattccgatccgcctcctcgatggacgccacagccgacgtaacctgcaacaagcccagcggcgcggaaccacccagcttccgcgccacgtagtacgagaaaacacgggccgttttcgtcgacgcggcaaggtttactacaaccgcggacgacaattccccgtcggacagggtccagtgcaacccagcctggttccccagtggatggatgggaggttggttcgggttggacgagaaaacgtattcgctaagaacgaacccggctaccccacctatgtacagcgcggtccaggccatgcggtctagctcgtcccgtgcgggatctgggaggttgggtgcgtgcgtcagatcggagatcgggctcgatgtccgagttaccgtgtagcggttgtacagtggcattagttgttggcgatgagcgctggtctcgagccaatggtcttttggtgagccgcgtttgagttctaggtcggttggcgtgctggttgtaggccagaatccgtagaggagggttcctttgggtagttctgggatcgttgtctcttctactgttgcgtaaccccaggctgggacgattccccatgccaaggaatcgttgtatggtgcgggataggactcggatacggggtatgcgtcccacctgccagtaattgatgagaatcttatttcagggcatttctgacagtctcgtctagtctggaagatattcggaacataccaatgcaagaatccacccattagggcgtaggtcaaattgtttgaagtgaggctgatcagctgcgtgcgaattcttactgaagaatccgatagttccttctgagtagtggcttcgaggttgaagctcgcatgctggcggttatccagctttgaaaccacatgaacgcccatggtgagtttggtcgtgaggaaattgcggatgagaatgagttagttctgtaagctactcgattactgaacagattcatgaagattatccgggaggagcctcgccagattccttgattcttttaaactgaatggattactgatcagagtcatagagatcatccggcggggaacccccaccagctgggacggcgagagtcagcccgattatgcactgttgtgcatgacagatatatctttgaatgatattctattgctttattggtttatattgagatctgtcatcgaattaatcacgtaactattcaaattcaactatgtaatcaatcgtgagatccgttaactatatattccttgttccttttcggactaacaaacatctctacatacacgaatgagtccgcctttactgacacaaatcgataagagtaagatacaaagcactaaataaacacaaaaaccttgagcaaaagcgagacaatttaagctcagttctatggaaccatagagatcccagaatacgataaagaagttacagatatgcccagtagaatgataaattagcagaatagattttccaaagccgccgagagcaaagaattaggaaaccaacgaagatgagtgttagtgcaaggaatgaatgcagaatgaaaccgccgcatagatagatgatcagatgagaaatgagatgacagatgcagaatagatacgaaaggagagtggtataaacaggctcgagatatcagctcgatactcgggaaaggcgaagatttgaataatggaatgtgagatcgcttgtaaaatgacagggttcatgctcgcgctttgcttggcgcgggtgtatgcagagatggtgatgtgatagggattatgtatgtattttcgttcgtagactgttctcgtgaggtttcaggctagtattgtaatgccgagggttcaaggtaaccaggattggggttgggtgcttggaagggtgcgatttatttgggttgagattagaaaatgacgaatcgtttctgtttggcaggcttgtcgatttcatcttcagtttctaaataattcagttagcaaaatgtgtatacaactcggttggtttactcaccctggacatgacttgtggcctgagccttgcgctcggctttcttaagccgggctgtgctgcgcgtcgctgcattgcgcgcagcagctggatgtttgccctcggccgcagcccgaattgtagcaatccgatgcttggcccgctcatcgccctgatctgcggctttgacataccacacattcgactggagaggatcacgccggcagccaatgcccatttcggtaaagtagccgacagcatactcagccttcgcgaggccgagattcgcagcgcggagagcccactcatacgcctcgttgtcatccttctcgagcacaggctccgcgccaacgagataccacgcacaaagcgccatcatagccagcggatgtccgttctgcgcagcattggtgtagaaatggatactgagcgccgggtcgcgtggacaatttaattttccgtgctcatacgcatccccaagccgatagcaagcttcgacgtggcccagctcggcagatttagtgaatagttgcgctgcataagtggcatcagggaagacatcatctccgaagcctctttcgtgcatcacaccgagctcgtacgggccagagttatactgtgcatctgcagactcggtcgcgcgtttcatccatttcacgccctcgcggtaccgcttgcctagccccatatcgccagcaatacaggcgttggccatgcggatcatggcacccgggtggtttttcgacgctgcctggcggtagaactgtactgcgcggctgccgtcgacgcgacacccccagccgaactcgtagcttaacgctgtgcggtagcaggcttcgacgtggccgtgtttgctagctgcgaggaagagcgggaaggcccggtcgtagtcctcgacgcctttgctgaagaggcccgacgcgtatccgtcgccgagatagtactgtgcgaaggggaagctgcggtctgcgaggcgctggaggatggattttgattctcggagtagacgggcgcgcgttatcgggctggagtcttcgacgtccacgggcggcatctcgcgcatcgagttcaccatgaacacggcgaattcgtacagcactgttggctcgtcggttttcttgacattcgccaggtacatctcgaatgtctctttgtggctaaggagggaggcgttgtttccgactgaggcttggagacgcgagttgtcgaattgcgtggttgggcctggctgcgggtatgatgtgttgagcaaattgaggaatgatagagacctggtttccggggttcctgacgaggagcgcgcatttagatacggggatgcggagaggttacgtcggtgacgcccatcggaggttgaggagtatgccgaaacgggccgcgacagccttgttcgcctcacggccagcttatccgtcgaggcagacgggttatctccattgggtgcaggtttcctggtaactgccgcggccggttgctggtgatggtaggccagaggttcatagttgtcctccactagcggcacgctatccaagctttcccgcgaggagccgttatggctttgacccgcgcgctctaacgaggggcggctctttttatttccgtgtccgtcatccttcggatctatcaccgaccacgagccgctgctcgctggggtatgaccgtacgaattcgaatgtgtgtagtgggcctgtgatgagtctcgccgctggggatgggcaggattccaggtgtgctgaggcggctgtacggggtcgtcaagtgacaggtctgtgaactcagggaggtccaattgcggcgtggtgggcccactgtatgcgccttcgatgcgcacgctcgaggcatcgggaatatctgcgctatgtgcgattttgaccggcgagcgcggagagtgttgaatgacaagggaggtttccgatcgcgatgcttggtgggctggtttgctcaggttcaacttctggggtcggttcgggatagtccgtggtgtttcggacggggtgaatgacggtgatgatcggaggtaggctggtgggggagaaggcaatgcctggcggtgtcccggggcaggactggccatggtggagttgggaatatcaaagggcgaaagcgagcggaatttcaagatccatgaaaagcgcgaacaggtggactttatggggaatccgagctgtggagaacgagtggacacgaccactattgatatttctcatcgaagcgagcaaaagaaaagaacggtctctttcaaatcgtcattctttcttttcttttaatttatgtttcatgcgcctaatacgggtggggatgaactattattatgtctctcatgccctcgtctaacctaaataccatcagttgatgcctatcggatctgtaaatagggctttccgagacattcatcagccgcgccggtctaacagcgcataagacatgccttcaggtcaaatcccctctttcactgtggagacaacatgtgctgcttcacgtctttagttcgcctttagttctctttagtctctctttagtctttccttagtgtcttggtagctcagtagtgtctttagtgtccgacctttccggttgtgcgtggcagatgtggatggaaagtggaagtacactatatatccgtcctggaggtcagctttaatatctactccggactccgtgactcctatttgaaacagaggcttgagcgtaaatggcgaatatattgcccctttcgagtccttctctaacatgtgagaaacaaactaatcaattgagtttatccaatccatctccatgtatactccttgcagcagtcaaccacaccgtcaaagcacggacgaaaagcaaatctcatctttagatgacgacatttcctacgcggtgagttcattctgcttaacttgataccggcatccctcgcagtaagtactagatattcggtatttggagttgaagctctgtgctacctctggagacatactgtcggcattctagcaagagccaaagaacgtggccggacaaggataccggactccacagtcaagatccccagcaaatccgacgccaagttggtttctcaatgggggttatttcgaattgaaagggagtaattgcctgtggacatgatacattcctttcttcttcgttcaagatggtcgatcgaaaagatatggccttcgagttcgaaacggcttgatgcatatgcactagttatggggccatgggctggacggattctgggggttgccgtgatgatcggcggcctgttgtcgatcactggttggattggcattaccccgtacaggattatcctgagcttttatatcgaaaccatattgattttgacttgtttcaagagcaatatggaaagaactaacgcgttctgctgaccagaatccagcctggtggtacaaatattggtgttttgtcaagggttcgcacatatggcatgcattacctttcgattagtattctctgaagcttggatctgaatcacaccgactcaaacacaatatgtgagctcggtcttatctagatgtatcacaaagcaggttgccagttttcacaaggcgtgtcggactattaactatctagaatcggagtccgtgtaacagtggcaatatctaactagtcggcgtggcagttataactaaacatcaacagtctaagcccaaaatagaaacaaggaccccgtgatcagaaggaaaatggttgttcctcggctgttgtttccatttgatgaatttattaattatgaaccttgggcgacatctggctaaccgtggaaacgagagagtttaatttatctccgcggccagctgggcaggtgattggggtattgcccctagcgacaaggaaattatttatttttatttttatttcttaatatggcaaaacaagcctaacctccccaggtcaagcgcagagggagtcccgtgtacggactactccgtacagggtctttgtctcagaacttcccttttcccttagacacaattgctattactatttctactgctgcattcgctcgtctctgtgttttggaccctttcgttttcttgcgtagtggggactttgttattctccacccgttgcacaggccgaccgtaccactttcgctgagaagtctcaactctagttgctggtcaatagagatatcgaaaactgaaagaaatctaagattcgtacggaaagacgaatcctatagctcacattgtcgaggaccgggtctgcgcatttgacatgtttcagtcggcaagcgacatattgtgaacagtcttatccacacattcgctgttgatcagcggaaaataaccgaagtgagtaggccagtaagttcaatccaactaacaactggggtctgattggctgacatcgggaatcttaggagatgtctttgccgcagcggccagggagaccctcgcctcggcgtgaagaagcccgcgcatttcgcgaaccatcccagcgccgtcgacgggatatcgactcgggaacttacagcgacgacccgacttcccactcccatcggcatcgccgccgacattccagccatcggagagcaatggacacggacgaagaacgcatggaccggagcggggatgtgagacacaaaaagcgcatggtcaaaccagagcgcaggaaagacgaccgtgaccaacccaactatcactaccgtcagcgatcaaatcacatgcgtatttttccctcgacgacgggaaacgatccgttattggataagagagatgaggtggagacgaacagctcgcgcagcatggacatgaagagcaagggtctttacgcgcggggtaatatcaacaaacccatggagcgtgtccctagcagacatcgctcgaagaagaagaagagaggctcgcgaaggtcaaggggcgttgcggaggaaaagagacgtgaaaaggcaattgagcagagtggtccgcccgagttatggcctacatattgtgtagttctcacattcttcatcccggactttttgctgaaatgctgtggaatgccacagaaagagcagcgcactgcttggcgggagaagatcggccttatcagcatcattatgatgatcggtgcttttgtcggtttcctgactttcggtttcacggctacagtttgtgcctcgcccccggttcgattgaaggtcaacgaagtcagttccaactacatgatcttccatggaaaggcatatgacttgtccggttcgaaacaccccgctgtcactggtatctctgccaatgcgaatgttctctacgacttaccacacaagtatggcggacaagatggcagcttcttcttccaacaggtcaacggtgcgtgcaagggactgattactgccacgtctgatagcgatattccaacaaactccgatggagatctcggttggtacttcccttgtgcgcccttcaaccaggatggttcgtccgaaccgaatacgactgttgaatattatgtgggctgggcttgtcataccagcaaggcggcccgcgagcctttctataccctgcacagtgaaggggatgtgtactacacctgggaggatacaaagaacaagagtcgaaatctggccatatactccggaaatgtactcgacctcgatcttctcgcctggtttgacactagccaggtgtcctatcccaaacaattcgacgagctccgcaagaatcctgatgtccgcggtgttgatctgacttactacctgcaaagcggggaggagaagaagatcggcaagtgcttggcgcagatcatcaaagtcggcagtatcgacactgatactgttggctgtatcgcgtcaaaagtggtgctatacgtatccctgatcttcattctctccatcgtgggtgtcaaattcgccttcgccctgctcttccagtggttcctggcacccaggtttgccgcgcagaccacgagtatggcctccgacgctaggactcgcaatcagcagatcgaagactggtccaacgacatatatcgacccgctccacgaatgaccgaacccaccattcccgatcgcctcagcaaacgcgccagcttcctcccgaccacttctcgtttctccagcccgtataatgtgaacagcagcgctgggagcaagcaaaagccgttgtatgtcacgatggctagccagaactcgacgtctcggctcatgcccagctccaatcctggcactatgtataagctgagccacagcgggagcgggggcactctgagcgctgacaattcccggcataatcctggtgccagtcggactagcttggttccgaccggccagggtcaacaagatacgggttatgccacgctatcgacggattacgagggcttaggtcctgctggttacattcacgaggctgttgttccgcaacctccgcctgaatggcagccattcggctacccactagcccacagtctttgtctgattacttgctactctgagggtgaagagggtattcggtcgactttagattctattgccatgaccgactacccgaacagtcacaaaacgatcttggtcatttgtgatggtatcattaaaggtaagggagaatcgttttccacgccagacattgtgctaggcatgctcagggagcctgttgttcccgaggacgaggtcgagccctactcctacgtggctgtggctactggctccaagcgacacaacatggccaaggtctacactgggttctacgactacggccataattcgatcatcccggcggataagcagcagcgcgttcccatgatggtgattgtcaagtgcggaactcctcaagagtcgacccagtcaaagcccggtaaccgtggcaagcgagacagtcagatcattctcatgtctttcctccagaaggttatgttcgacgagcgcatgacggaactagagtacgagatgttcaatggcctgtggaacgtcacaggcattgccccagacttctacgaggttgttctcatggtcgacgccgatacaaaggtgttcccagacagtttgacccacatggtctcggccatggtcaaggacccagaaatcatgggtctctgtggagaaactaagatcgccaacaagactgacagctgggtaacaatgatccaggtcttcgagtaagtctccactgtccattagcagcgcagtaactaattcaaaacaggtactttatctcccatcaccaagcgaaatcattcgaatccgtgttcggtggtgtaacctgtctccctggatgtttcaccatgtaccgaatcaaagcccccaagggcggccagaactactgggtgcccattctcgccaacccagatatcgttgaacactactcggaaaacgtcgtggatactctacacaagaagaacctgctccttctcggtgaagatcgctacctgaccaccctgatgctcaagaccttcccgaaacgcaagcagatcttcgtcccacaagccgtctgcaaaacagtcgtgccggacgcattcctcgtcctactctcccagcgccgtcgctggatcaacagtaccgtccacaacctatttgaactcgtccttgtgcgcgacctgtgcggaaccttctgcttcagcatgcaattcgtcatcttcatcgagcttatcggaaccctggttctgcccgctgctatctccttcaccgtctatgtcgtcgtcgtctccatcgtcaagaaacccgtccaggtcattccgctggttctgctcgctctggtcttgggtctgccgggtgtgttgatcgtggtcactgcacacagactggtctatgtgctctggatgctgatctacctcctctcgcttccgatctggaacttcgttctgcccatgtatgcgttctggaagttcgacgatttcagttggggtgatacccgtaagactgcgggcgagaaggataagggacacggcgatgccgagggcgagtttgatagtacgaagatcacgatgaagaggtggcgcgatttcgaaaaaggtatgtcttaggttgccctggaatgatttgtcgattctaatattctcgatagatcgtcgtctacgaagtgcctggtcacagccccctacaacggatgttcatccatcgcagtacgagccttattcacattactaacgaaagcgtcagcgcttcatttcttatttgctttttcttgcttcccctgatgcacgtgatctattgtactatttacatatcggcgttcaaacattcttataatatagttcagagcgttacacgactgacgattgattatttacatatttttggctttcttctgtttcaagcatttgctgtcttgtacggcgaattggactgggcgcgttgtatgttaggaaataatcgtcatcctactggccatagcgtaaccaaaatagcatcatgaaccctgtcaaccaacatgaactatcaaatacgtacttctaccacggcttcccacagatcacgtcagcccaagtcgtgcccaacagcatccaagcgtgagtcaccgggctgtccgggttggatgtgcatgttacgtgctccctgcattattctaatattgacacatgcgagaatatatgatcaagacgatgcactttaaattagtttacgtgcttaatgcttaacccatgtcggatcagctctatgatcgagcgaggtctagaatggacgggacaacagttgactgaatattaggaccgaatccttgcatattctcgcgatgtatcatcttttgccattcgtttctttttttgccttccatgtatatattcgccccgagctcgcacgtttctctccccacgttccatctgactgcatgggagtgtcagaattaatacgaatccccttcttccccttatttgaacggaaaagcctaccgcgcactgtcctgttttccccctctatttttcttgggatcagcccacatctcgcactagaatagcagccgctataagattgccccgttgatctcgtcttccttttcccgctccttactctgcccctcttcggttgccctcggcgttttctcgctttccgctctccgctctccgccttttccctgacttggattccaacgccacgcctgcagtgtggggttgaactctagtcgagatcgctgcacgagaggacagatctggtaaatcctggaaaccgagacactgggtttctggttactggatttttttcctccgctcgtgcgaccgctattatcagtttcgggtcggatgtccatggcgggcgatgcttcatcccgacaactgtaactctacgaatcgtccctccgactcatctgcccgctcgcgagatcccgctgcaccgccgcgtcatgtgttatatcctccagttcaaccccgagctatgaatcctctacatcgttccggtactggactgtctggtcgagaagaccacgcgacggcctggaattcgcctgatttcaatatacttcctaccgatcgatctgccccgcctgcgaatatgacctccgagatcgatcgccgcttccatgacgtgggtgtcgcagctctggctgctgtgtctcagtacccgcgtgccctggatactgcgctcggggattcttttctcgtgtcggaagtcgtcaacgctatcacgagtgcgggcagtcctcccgatcatcgacatttagatcccgtgggtcctatgccggtacaatggggtaattttcaacctaccccttcggctggaccggtgtttgtcttcggcgcgaacccgagtggtaacacgggtatggacacatccgttcgggacttgattaaccgcaccgccggcgggcagaatatcgccatcgccccggacagtgacatcggggatggtcagaaggatatggttatggattatcagtccgctaccatggaagacaagccatcgcccgcagcaacatccgatgatgagctggaagactttctccagttttatcccgatgaagaggagtattactacgagcgcatggaccggccgacgcacgaaccccaaatgccagactgcaatttggatgacttttataacagtatcagttatgaagatatcgaggtggatcacccaaacgtacctatggggaactacaccgacggtcagatggatttcgctggacctcaccccgcatctataatccacacgtcaagtaagacccaatgactgttgatacaggcctagctaattctctctagcatacgagcggaacctcactattgatgaattcatccagcgctggatggtctcgataaacgtcatcccccatgggttccattctgaaagtcgaattccaccgcagcttcgcccactctccaagatgatcagctggaagccgccgccggagattgttcggccgtctggatggagacgcgatttttacgatttgcagcagatcccgtggacagaaaccttgcgggtgacacggttcgatgcacgagctgtgcgtgacgcctggtatacttcgtatcataacttggattactcgcaccgtggatatgcaaatcgccttccccagcacgaaacctttttccgcgggaactctatgcacacttcacacaaagcgtctattgaacacttccagcttcgcaatctgatgtcggcccctgcatctaataccgtccatttcgcttccagctcaaaggtgttttcgtggaccccaaaaaccggcgacgcacgctgtataatcgacctgagccagcccgaccccgacttaggcttcctcagcccagtcaaaatatccaccatgaaaacagcgcacggcctgacaatcgccggcgggttctgcggggaatacgccctacgcagcaccagcggatccgaccctggcataaagggcctcgtaacccccgacttcaacgacggcatcaccaaccacatcgatataatccctagccgcaccggcccctccccgaccgccgtcttcgcctccaacgacaaacacctccgtatcctcgacaccgaaacaaacattttcacctccgaccaagaactctcccaaccaataaactgcaccgcaacatcccccgacggccgtctgcgcgtcgtaatcggcgactcaccggacgcatgggtcatcgaatccgacaccggccgacccgtgcaccccctccgcggccaccgcgacttcggcttcgcctgcgcctggtccccagacatgcgccacatagccacctccaaccaagacaaaaccgtcatcatctgggacgcgcgcacctggcgtccgctcgaaaccatcgactcggacgtcgcaggctaccgctcgctacgcttctcgcccgtcggcggcggcccgcgcaccctgctctgcaccgagcctgcggatcgcatctccatcgtcgatgcgcagctcttccgctcaagacaggtgcatgatttcttcggcgagattgggggtgcggactatgcgcctgacggcgccgagatatgggttgctaataccgatcgccatttcggtggtttcatgcagtatgagcgcaggatgtgggggcagcgggttgggttgacggatttgccgtgtgagtgggttaccgaggaggagttggcggtggatcctaggtgtgttttgagtaggagggagcgggggttgaggtttttgaggactttatcggatgaggagcatgatgcgttgattctttgattctcttatgactgttatgttgtctttttctttctttcttttttgggtggtattctttgcgccttttatctgcatctgataccctgggttgcggtgttggaggctatctatatttatttctttttttttttcttagagtattgtggctcataataatagttgtaactagtcgtcgcatacgttttatacttgctggtcacatgacatcacatctcggcgtatttattctccgattactaagcctcaaatatccactgcattggatacgtggacatcgccgtgtagagccaagaggaacgatactttggcaatttattttctgattgaattcattcaagttatcacttcctctgctataccactactcttctgtcagcttcatctctatcatctctatatcgtagttcctccatgtaaactccggactagaacacactgaaatcaccagatcaccagatcttccaagaaaaaacaacccaactcgatagtcaacgtctgaaacatccaataaaaagcccgctctggtaattggccacctcagcttcgatccacctgcaatgcgatctcacagcgaatcacccaaatcggcgcgatcaacaaaaaaactgccccgcaacccctcctccagcctcagctgaagctcttccattccattcttttcctctagctttctattaaatccatagcatatctccatttccacctttttcttgaacaattctatcatattcactcacatcctccattttaatccaaaatgtcttaccgcgataacaaccagcaatacggcggcggcggcggcagcggtggcggcgccagcgacagctactacaacaagaacgaggacttctccggcggtaacagcaataacaataacaactcctacggcggatctggcggtggcggtggctacggcaactcctctaacgagggccgcccttacgagggtcgcaacgagggccgcaacgacagctacggcaaccagaaccaaggccagggtaactacggcggtcgccaggagtcccacggtggcggaggctacggtggctccagcggtggctacggcgataacaacaactcctcctctggctacggcaactccagccacggcaactcttcctccggctacaaccaaaaccaagaccaaggcagctacggcggtcacggcagcggaggcaacaacaactcctcttccggctacggcggctccagcggcggctacggcgacaacaacaactcctcctccaaccagcactcttccagccacaacgaccaaggcagcagcagcgaagaaagctccctgttcagcaccgctttgaaattcctcaaagaccgcaataccagcggcgacgtcgacgagcagaaggtcgctaatgcccaccaggccatgtacggctccggcagctcgtcgaaccagcagcacgattccagcactgttggtgcgggcgctgcggtgcaggctttgaagatgttcgctggctccggcagtgggggcggcagtgatggcggcttggataagaataagcttattcagcttgctatgtctcaggctgggaagttgtgggatgagaagagtggttcggggggttctggtggtggtgtggtatgttattcttgtgcttcttttggttgggttattgctaatggtgttacagtccggtgataagcagtctgctgtcaactctgctgccgagatggctcttaaaatgtatatgaagaaccagggtggctctggtggttctggtgctagcgggcttatgagtcttgcgagcaagttcttgtagatgtttcttcttgttgaatgtgttggatgatgtctggcatttgagatatatcttttcattctagcttacgccgcttttgaacaaacaatcttgggattagccaaaagaagataacagtatcccatatgagaaagcgtatctgtctagcgttcctggttacttgggacgtattacttgactgggggactgttggcgtcttcggaacaactgttagggttgcagagcctatgtatactcaagcattctctaacctttactcccaccgttttatatcaaccacttcatttgcaataatactgcatacctctcaattcgctcagtcatattctaaatataactccatctgtctcggccaacggtgccggcgacaaagctttatgccaagccactgatataccgcaacaagtaccctatcaacccagttgtcgatcctcttagacgagtaaagatcgtccgattaaatctcgtattcttaattaatcacttacagagtactccctagtgcattcacactatagtgttaataacccctggttgatattcggcaattcaattctcgagattgaaaacggtatataccagaataggggtgtccactatttctcttagtttatctatgaagataccttatgaaatacccaataaccactaatggcattggcattggcattggcattggctaagtaatcttccaggggccaagttatgcattgagcttatccccagttttcatgacataccccactcccgtcctaaccgtcaacgtagattcttcagcgacatgtagatcaattccaatatagaatttcgacgatgcatttatcgctagcgcgctatagacacggcatatattcttgagtgtccaagccgagcgaggggtcaagtatccgtgctatcacaactatgcaggaaaaagcctgcacaattcaaaatgaacagatgaggtcgtactagatcatcaaggaatttgttatatatactattccaattattttctgccttcctgtcattctagtatgtttcttttgtccaattaggcatcttcttaattcaaaatgctccttcaatcggcttcgagtttgattcaggaacactatatctccgtcatcgccacttcggtacgtttactacaactttattcaattgagccagtctaacatgctctgcttagattctactatcactagtctcgcatgcatactaccaaatcttcctcaaccctctcagcaaataccccggccccagactcgccgccacatcacgcatacctcaaatctaccataccctaaaaggcgacctcctcgaatgggtcaccggactacacaacacccacggcaacgtcgtccgcgtcgccccagatgaactaagctacgcaaccggcgacgcctggaagggaatctacgggcacgcctcagccgggaaaccagtaacagagaaagacacccgcttctacggcccatccttcaacggcgccgcagatatcatccgcggaaaaggccccgaccactcgcgtttccgacgcaacttctcccacgccttttcggaccgcgcgctgcgggaacagcaggctttgatttgtggatatgcggacgcgttaatcgacaccctccacaactcgatccgggaggatcccgcagcgaaaataaatatggtccgcatgttgaatctgacgacgtttgatatcatgggcgatttaactttcggtgactcgttgaatctgctggctgggactgggaattgcagttgggtgtcggctgtgttcgtcagtatcaagacgaactctctgcgcagactggcgcgctacgtcccttggacggcggtcattgtccagcggcttatcccgaaggaactgaagcagcagagtatcgaacattacgaggcttctcaggaacgtgtggacagaaggatcgatggcaactatgtgcataaacctgatatctggggtattgtcatgagccagaaggaggacctccggcttagtcgggcggagatgtatgccaattcgcaggttttcatggtggcgggtactgagacgactgcgactgcgctgagtggtttgctctatcacctcctgaggacgccggagaagatggagattattgtagaggaagttcgtgcgacttttgagaaagactctgatattgatatgagatctctggagcatatgacatatctcaatgcgtgcattgaggaagggttgcgcatgtaccctccagttccggttggtctgccacgcattgctcctgatgagggattgcttgtttgcggagaacatattccaggaaaggtattcattccgttgtgttttcgaaggttggttctaatcttggatgatcatagactgcactttcggttcatcattgggctacctaccacagtgctcaaaacttcagattgccaaatcagtttatccctgagcgctggattggggatgagttcgccagtgataacaaggctgcatttcagccattctcatttgggcctcggaactgcattgggaagaagtatgttttcgtcttgctctcgaatggtcctagctaatgatcgatagtctggcataccatgaaatgcgtctcattctggccaaggtgctgtttaattttgacctttctcttctgccggagtctgttggttgggacaaacagaaaactttcttcctgtgggagaagaacgatctgatggttcagctgaaggcgaggaaataagggcgatgtttgaaagaacttcgaatcttctattcagcattcacacattataggcatttcgaacaaattcgtagtttcagatggtcaaacccatctctaatgtactacaatttcaaggtaaagttaatatgaaaatcccgcataacagtgcatgcagttagccatatcactttgtcaagtacaataaatattgatacattttcgcgatgatcatatctgttccctgttttctatggaaacacgataacatgtcgaaatttggctgtgctgtccatgacaccgttgtatgcctgcgtgaattcgtccatcgtgaatacttttatcatcgccttcacattattggtggcagagtactcgatgcatttctccatgtctggtgcacagccgcaagcgaagccacgtagggtagcacggttcatgttgaggaggagattatcgacttggattggaccatccgtagcggcagagaccaaagtgatcgtccctagagaggatgtcagccaacggcaccacatcgcgaatggtaaatggaatggaggcttaccattcttcgtaacagccggtataatagcattgatggccttggaataaggcgcagtgcataggatgagattcgcaccaccaagagacgacatgtactcgacaacgtcgattttactcgagtcaatgtattcgcaggcccccaaggacaatgcgagatcccgtttagaagaacccgacgaaacagcatacacctagaagaaaagaccagtcagctatgctatagcaaataagatatcctctcctttacctttaatcctagtctgttcgcatactgaatcgcaaggtggcctagtcctcctactccctggacgaggcagatgtcgcccggagaccacttcgacgtgtttatggcatcaaatacagtcgccccggcacagcagagaggagcgagttcagcataggatgctgtcttcagcacatcctcggcaatgtcgatgatagccgtgtacggagcgtacatatactccccatgaccaccatctatcgtaaacccagtgtaatccacgttgcggcaggtccaaaactgtcctttccggcagtaatcgcactgattgcagtagccgccattccaaccaacgccgaccaaggcacctatggcgaaacgctccttgttcaccgggctttgtagtagctccgagcccacgccggcgatacggccgatgatctcatggcccgggatgcgcgggtactgaaggccaggccaggcgccatccttgacgaagtggtcggagttgcagatcccagacgcgtgcacgcgcacgagtacctctgtcggtgcgggatcacgcagctctaacgtaatgacgtcccaggtactctgaggtgcggcacattggactacagaatacgtgtcagaatgaaccaatgaatgcaaacataatgacaaaaacacgtacttgctctgtaggtcttggggagtgaagaagccattgttagttagggttaaataatgaattacgaacgaagcgtcgttgtagaatatagattgggtagagttcttcaattgaaaatggtggatatccctattttatagaaaagtttactattgcaaggagagaccatgaacagcacagaagaaatccgaatacaaagatatctccgagaaaaggcttttgttgtacggacgtaagcataactccggatcccgattacgaagacccatagcgctcagggttcaaaaccccctttagaggggattcggccggaggaaaacatggcatgttaccactaattagggcaaaaaggtgcatacaccttagcaaggataaccggtgtggaagcagcggacagttcatccaacctgtttattgatccaaccgatgaagataagataggctatcggtcacgtgactttgtcgggccacatcgtctcggaagttccgacagattcttgaggcctgaatgcctgaattagcaccgctctccacaccgctctggacaagttcaaaaaaatgaagccttcgggcctaaacaaatcccgtgacaatcacccgatttgatcaattagatcctttctagcatctaacattgaattgccgttttcagaatcaaactatgtatattactggtgatagtagaattaatttaacttgcttcggattatgtgatctctgaatagcttcatctgctaacatggagatacccggccgacagctgatcgaatgttgaaatgggaccgctaatttagctttaaggaaaatatattaatccgtgttaatccgcgtttcgaccatctatctgctccgagcggtcttggcgaaatatcggtggatgttgatagaataatgatattgtatgattttgattcgcgaaacggtatatattgaactgactctacaaaatgtaacgacaagggtagaaaaaaacaatgactcgctgacctgtacatgcacatgccacgggcccaacaaacaaaaataaaaggtcaacgctaagcgcagaaatgtccaacaccgcgaccgaccataaacaattactgctcactctaccactcatcgtcgtcgtcgtgtttgccctgcatcgcactttgtcgtgcccgcagtgcctcggccaaaccacctgccaggctgacgttcgatgcgctgttgggcgtgccgcggccgctggcgcccgatgagtcgtttgactgcatgctcacggcgctatcgcgcgcagtgggcgcgcctgcgggtttgcgcccggccatgttgggacgcttggccgggggagcaggagggtgaggcttgctctttgcggctgctgcagctccagcgccatttggaacagggctgggggtggcgcggggtgccatcggaggtgggggtggaacgggcttcggtgtgggagcgacggctacttcttcgaggtaggattcgggggtccatccttgctccgatgttgttgtgttcttgcacagccaccatcctagaacatgttagtatgattcaaatgaagtatgctatgggtacgtaccatttccttccttggacacaacctccacaatttcgcccttggtgatggaaagctcgttggcccggtcgctgttgtagtcgtacttgacctttgcggcaggctttcttgacgctggagggggtgccgcagggggaggcggaggagccctcatggagccagaagatctcactgagctacgcgactcgttccgagagtgcatggcggcggcagcagctgccatagactggggcacgatgcgcggctgaggctgagctgcagcttgcggtaccatggcaggctgtggggtagaccggggcagaggctgagcggcagggacaggtctgcgagcagcttgagacaatttcgaagggccgccaccggggccaccaggacgaagtagtttgcccgttgtgaccgggcgagcagcaaccgccttcggccgcggagtaggtttggagacagagctaggaggctcaccagcactagtgtggattgtgctgcttttgtagctgtccacgtttccggcacccggatctttgactgccttgacggttgccagcttgccaggcttcttatggtattcgatggtttctccaatcttcaaggtcagagagccacgcaggacattggtgagatgagtgaagaactcggttttgaagacacagtggattagcgggtcgggttcctgagctccaataaccagcgaaaaccagtcatccttgagattcgaggtgctgacactcttgatcgctccaaccggaacggttcgttccgctgaaatgacaagctggttgttttcgatactttgtgcaacaacgaaaacgtgacgattcgtcaagaccaggatccgcggaacaggtttgctagaacgaccaaacttagacaccaaaacctcggcacggcaagagaaaacaacatcatctgaaccgctgatgcctgcaccattgcggatcatttcaccaggaccaccggtattgccgacaccaaggtaatcacccaggaaacgacgagagccgagaagactcattctccgacgttccttgcgaccctggagcactttgtgtccctggtcacgaatcttgatgaattcgagtccgccggtcatgcggcgccagaagcgctggatacggatcgcacattcaatacggtaccggagatagtttctccacgcacgttgaatgcggatggccatattgtgccagtatttgtctcgcatggcttctagtgcgaatagtgtctcgggagtcttgacgaaaacctttgtgatacccatctgatactcctcggcagggatgcgggtatccgtcaagatttgcttcgcgccggattccacgtcaccagtccatgtgtagtcaccggcataggaagtcttcggggacaacaggtagaatcgctcagtgaacttgtcgaaggtctgacggtaggcgaaaccagcacgtcgaatgcggacgttttcctggagacccaggtacttgatctggtgcaggacattgccgacgttgaattccttgggggccttgttatcgttgggtttgatggtacgaatgtaagatggctgcgccttcatgagcgtggccacaaggtcattcgcggatgccttgatcttgtcaccggcggtaggtgggcgacgcttgtcatcttggttgacctcgttggggaacagcgcgtggacgaattcgttgctgctagattgggcaaggttcaacaagtccttcaacagctgatccttgttcttatctgtcattccctccacggcgtaactgacatcaccagcgtagtgcttgatgatgaactgcccctggcgagcttcaaagttggggttctgggccaggaagttgagtctgccaacgaaagtctgatcggccgcaccggaatcggcgtgggcagttgcgcaggcatcattcaaagcggcgaaaacaccaggagggcgcttgtcctcgatcaacgagcacaccaccttgttgtcaaagtactcgataggagtccacttgatctgctcgcgggcatactcatcttgttctgccttgagagtcaattgaatgaaaatctgctgcagtttttcgttgacatagttgatacacagctgctcgaaagagttcttctcgaagatttcgaatccgtaaatatccaggataccaatcgaattagtgatggagcctcgagcagtcagtgactgattgacgcgctctacaatccaatcgaacagattgaagtaaattcccttggccaaagcgtcgcgaacggctgaagcttggaccctgttcagcggcacttcgtacacagaacccctgcgccctcctcgggcagtctccatcagacgaatagtcaacgctttgttcacttgagcagcatccacctccagcaggtaggcgacaaagtcaacgattgactgatcgctaatagcagcgttgccagagtcatcctcggtgaactgaacatttccaatccagagaatagccgctagcatgcggaacacattgtcctgctcggcatcgctcattccaatcacccgcatcgcatccagtgtatccttgaactcggcaacatcgtcgattccgggcacatcataacacttggaacggctcgtatagaggtaagattgtggttgctggagaccgaagctgtcacggtacttttgtggggccccctttgtgagttggtaaaagatgtggaaattacgctcattcacaatttgtcccacaactcgcgacttttccagcagataatttgtaatgttggctcccaccggctcaccgttggcattgaactccaattctaggtattttccgaatcgggacgagttattgttgcgcagcgtcttcgcattaccgaatgactccagcaacgggttcgtcgccaaaaccatttccttggtctgttgaatagacgaatcgccgccgccggagacactggcaatgtattgcatgatccgcttcgcggcctcggtctttccggcacccgactctccagaaatgatgacacactggttgtccttgtaagatttcatgttgtagtatgcggactcggcgactccgaatacatggggagggacttcgagacggttcttgccgcgatacgaatcgaggacactatctgtgtagatacccactgtagtcgcaagtccgttagcaaggaggaaaccgaattctctcggcggagcaactcacagtcccggaaaggatttactgagaccagcacatggccaatataagtctggaagtctcctgtcagcctgtattcgtgttcgcgcacaaccccgcagcccgcgtgcaagagcgatcccttacataaatctcgtcatgctcgaaccggagcttcagattatcgttgatggcctcattggagatcttgctgagcagcgtgagatctgacacgccgatctccttcttcttgctgctctcgaaggcggccttcctgaccttcggctttccccccgcttgccggccatcgccaacatctgcggctgctttggagcgcccgaagcggctcttcttctctccgccaacggggcgtcgtgactgaccctaaaccgcaatcccagggtcagtttggtccttatctggtcgttgcgcaagtaggccacctaccatcttgtgtcaacctctcggggatctcgcgcccaggcgacaatgtgcaaatctaagtcaagcaaatgggggaattctagtgacaagttgagattgaggaattgagagtgaatggaaacagtctagaaccaattcaaggtaattgtaagagggaagtgcccactcggcggacttacgtacaactggtcaaaccgaagcaaacagctgcgccacaaaggaccctttttctggttccgtcgctgcctcaggggcgaattgggtatcaatttagccgcctgcccttagaatgatctttttgatactattcttattgatctattgaatttttgtcgatactcctttttcttgaacctccttggccagccactcacgtcagggcatgtggctaatgttaagaataggtgcacgacgtcattgggcatatatactgcctaaccaatttcgattgatatgcccagaccagatgaattggagccatgaaattatatatgggtctactcgatttgcatgtaatttcacttatcgttcttaactatgtagcttcgagtctgagagaccgccttgctggttgccgaggcatggtaacggtgtcggtatctatcttgacgcctgtaacacatcttttgtattctcttagattttgcctccgtcccatagctggcttcggtctcggcaaagactgcaccggcggctctgggactgtataactggcccgccaggtttgatggtgggcattgacttcgttctagaagttcaatgaatggcaaagacttgaagataaaggtatgatagcgatagaggggaataaaactgttgattaagttcataactatccatattgttcagagtaacacaccatcggggctcaacctcttccgtaagacttatgacggaaaaaaaactagcaccaacaaactcaatctgggagttcacttcttatcctgggatgaaaatgagaatttcgatggctggaacggcgagggtgggaccgacgcgggtggaaccgatgcggctggagaagatctggattggaatgatgtagctgcaaaggatgcaggtacaagcgcagtcggtttcggcaacacatctgcggtgttgaccaagatctaatcgtgatatatgagcaaacgaccgaactaagacttgtcatcaggcactcactggattggctcgggagacacccttcatgtaagcacttacgcaatccagaaggtatgatgcgtcggacacaacaagaacagggggtggctccgagaagcccaaggaaaggcagtggtgcagtgcgccgagagactgcactgcctcgatctgctcgttaccggacgatctcgcatccattaagtacatgatgacccccaaggacttcttgttagcttcggtgaacttctggattgcagtcgcagtctgatgtctagtggttacgctcagccggctgggggtcaacaaaagtgcattgagcttgagggagtgagtctgatcgagtacgtcaaacttcgatagggttcggctctggtagattagcttgaagctgaagtcggcatctcgagcagcccacaaagcttgatgagatttaatggttggactttttgtgacggagtcaagggaacttacaactgaaatctttcttggagggctccggcgaggctagaagatacggtcagctccacatgttgactcaatggatgagagtactgtaccttctttcattgtttctaatgcagtcagggtggtggccagcctggcccattcatcacgtttgcggagttctgggttgtattcaccccgaagaccgagcgttggcgttgttggagtcattacgacagtagagaagagagattgtgtactgtcactgtcgctcgtttgaggatggaaatggagatgagactgccagaaagattgagtagagagaaaacctgaacaaaaatggaattgtcaggcgcaaaagaatgaaagagaagagaagagtggttgcctctatggacgtgatgtgtgtatgtacatttcagggaaggagcggaatatcaagtgactccgcctcgcaacccctactctctcgaaaacaaaacaatgcttgtgatatttccagtggtcttttctatggggtatcttgactgaatgtaaaaagcaaatgcacgcctaaccttatataataagatatcgctaggatacgagtatcaatcaacaatcacgagcttttcgatgcaggtgatgatgtcggactggctgatgcagagtgttcctgggtttgggatgtcgatgcagccttttctgcggtagccctttctgctgtaggctgggtaacaggcgcaggctcggccgtctcctcggcgcgttgaccgaaaggaatgtacgaggcaagtcgtgagagccacccatgtacgatgtccggcgtatccgactctccggcttgttcatatatctcaggagacagaatcctcttcgtgtgcaacttaggcaagtcactgtgcttcgctctgagctgcagtacctccttttctagtgccagcagagcttcgcgtgcggcctgttcggattgttctagatctgctagtcttccctcgacgccttcccggcgggtgctttccttgctccgtgaccgccatgactcaaataggatcagacctccagcaacaaggaagaggaaggactcggagatgaaattggcaccggactcgatagctttcgactcggagaggggacggatatgatagtgttgaggcttggccgcgtcttcagccgcagccttggccttggcctctgcctcctcggcggctttcgtgtcggcggcgttccgaacggtggggattgaaagcttgtgttttcgcgcttcggcggcggcgatggcttgacgctgtgaggcggcagtatcgcgcagggagcctagtctaagacgcatatcgaatcggtgaagagcctgggctatagacacgcagatattgcgaaaccgttcatgttcgcgggcctgggctttaatttgagactgcgtgggtcagtctatgaatatggcaaggttggactgggatgcaagcttacagcgatgggcttggacagggtccggattgccaaggaggagagcttcagagtcaacgacatagctggagaatagagagtgaatacatgaggcttgagtcacttccttacctccgtgttgcccgtggacccgcggacccgcgttgattactcagcaccgccaacaccgccctggagcgatcttaggcttaatttcgatatttgcttggcagcgacaacagctgagattcatgcagttgatataatactccgtgtatgtcaaactactgcattttacagtcccactctttaagagagataaacagagccagtaatttctcgacatcgcacgggatgcagccaccctatctcattcatatagggctagcctgtcaggccaaatgtggcatgtacaaccgttcggagagtaaacaatgcacattctatggcctgttctttctgtcgcaatacacattgcatcctacaagcgcgccatcctgcagtaatcagccaataaggatcccagaataatgccattccaccaaagttacccccggaccccacggtggttcggctgaagcgacgttttaatataatttccttacgcgagacctcggatttaaccccaaactaggcagataagcaaaaattagcctctcctcatcgaccactaaaatggtgtgattgctttatgtagtatttggccctggaaatgttttcgcctttctctttcctgcaacgacgccatggcaggggtattcgaggaaaagagctctaagacagggagtcagtacgtcgtgcacaattttcacgatgtggaagatcaacccttcaccccacaaggtcctttgagcgctgccatccccgacgacgggcagatcgttacccagaatgaacgccaaagcttgatccggggtctggggcagcgccatattcagatgattgccattgcgggcgcaattgtacgcaaactgtttattaggattgcaactttgtgactgacctaaatagggtacgggtctctttctcggtctgggtggctcgatcgccaccggtggtcctctgggtgcccttttaggctacatgttcatcggcctgatagtctgctgcatccaatttgcgctgggagaagtctcagcgctgctaccagtcaccggttcttttgtgcgacatgcagagattttggtcgatcccgcgctcgcatttgcgatcggctggaatgtcgtttatggatgctttctcagcgttcccagtgagatctccgccagcgtggttcttattcagtactggacggatatcaacgccgccgtctgggtgactatcctcatagtggtgtcggtggtggttgccgtctcgtttattggcgtctacggcgagattgaatttatcttcgccattctgaagatcctgctggttgtcttcgtggtcattctcggtcttgttatcgatctcggcggtgcgccgggtgtgccccgacgcggcttccactactggaaagaccccggcccgttcgttgagtacattgccaccgggtcttggggacaatttctcgggttctgggctgtcatgactaatgcagtctactcgttcgctggcgtggaatcattagccatggccgccgccgaaacgcaaaacccacgacagaatatccccaaggcctgcaaaagggtgttcgcacgagtctctatcttctaccttgccaccgtcttgatcgtgggcatgttagtctctagcgccgacgaccgtattagcgcagactccggcacggcggccacgagtccgttcgtcattgccgccagcgacgcaggtatcagggctattccctccgttgtgaacgcagtatgcttgagctctgcgtggtctgcatcgaaccagagtattctggccggaacaagaactctatatggtctagcgctcaagggccatgctccgaagatattcctgcgcacctccaagtggggagtgccgtacatgtgtgtgctgctgcagatggccttctctctactggcttacatgtgtgtttccaacgacgcaatgaatgtcttctggtggttcgttgatttgactgcggctggtaccttggtctcgtggattgctatcgctttcaaccatattcgtctgatgcaagcaatggataaacagggcatatcgccaacagagttgccgtggcataaccgaattaccagtatgtatcagtctggtttcagatcagtcttgaggttctaatactgaccttatcaaggatacacaagctggtttgcgctggtcgcatgtgtcataattctcttcactggaggattcacagtcttcacaacaggaaactgggataccgcctcgttcatctcgtcgtatctgtgagttttcttctcgtaccattgagttcgatctgctaacattgacactagggacattccactcgtcctctttgcgtacggggcttataagttgatccgccgcacaaatattattcctctaaggacgataccggttcaacaagcgatagacgaggccaacaacgacccggacaacgtgccgatcaagaaagacagcatactggcaaagatgaatattttctggggctgacatatctcctatcatagctagcagactagcctttcacttaataacataataacaaccccgtggcattgtgttttgctcccgttgttctatgtagtctcatgtaatcaatatatacatgtaatcctaataccccttgccccgcgtataagagttaatcaacggcccaccccgcgcgatacgctccagatttagctcaaggatatcaagcgagcgcgggaaatactccaccccaagcgcgctgacatgcggactaatctgaacattggcagcctcccagagcggatcatccttaggaagcggttccggatccgtgacatcaagcgcagcaccactcaaaacccccgaattcaaagcatcgaccaaagccttctgatcgataaccctaccccgggagatattagtcacgtaaggcttactcgaatggtgctgagaatggtccgagagaatggtgaattcctcggcaccgaggagacggtttgtttgcggtgtcagcggaagtgagaccaccagatgatcgagcccggtagccaggaaagagcggagggattcgcggtctgcgccgtgatgccacgatgccgggatcgagccgtcgggatcgcccgtgccgggcacgatgtagccgttgtcacgccgggattcgggtgttgggcgtggggtggccgtgtatgcgtgcacggtcatgcccaatgcttgcgagacgcgggcgactgtcgatggttaacttttggtatcttgtttatggaatttccagcgagtggatgtgcggaaacatactttggcgcccgatacttccatatcctagaatacctacctttttacccacttggtcatgaagacctggcctatacgcggccttatcccatacgtgggatttctgtgcctcgtagcccttggcgtatctccgggatgataccagccaattcatcacagtccattctgcaatcggaggaccatggatacccgagcttgtagtgatggggatatcagtttcttgcagaattgggttttgcaaaatatgatccacgccagcagagaaggtgtggattagtttaagactatagtaatggttaatacatagtaggaatgattgaggtaggagcttacttcttcgagtccttgagatcaggaagatcgctgaaagtcgcgaggacagtggccttttgatatacctctgcgcgagtttagtttttgtgacctcgattttcaagaatgatagccacttaccagatggcacaggagttccctgagactcgtagatagtgacctcggcatgggagaatttctgtaggataacctccttcacctcttctggcatcgtcgggtagaaaataacgagcacatgctccggtgacaatggcgcgtcgcccataattgcgatagatagttttcaaagtgtgtgaccaaaaaagaggtttggggctttaaatgggaattctcacagggcgcgggcaatgttttccttatcttccccgcctcggtggctcaaaagggcaattcggcatctccaaggctaacatttccttataaacggatcggatggcggtttcttattggaatttggggagatggtggtggtttatgccagatggcgtggtatgacgacactttgattagatatggtctcagcgcacgaattagtatagtgcgaggctttataataagttgaaggagctttctagaacaagaatgacaccatcaacagaaaatcacatctttgatatcatttctactggaattgagtttgtgcctgagtgctagctacaccaggaatacctcagcctcctccgttctggtcgaaacgagtggtctactaaccggactcgacagtgttcgcctacacaaacgggtcaagataatttacgtttatatgtgtcgatgaatgatcttcattgtagacatacttcacgagccttggtatggattatatgcgcatacgagcccaaacgcgtcactcccatggaacgagcatctttagatagccacaggaataaatggttatcataagcttaatatccgcggtgaaactacatgcacgaaattgcctctaataatatactgtcaggccccttgtcttttacaaagaagcgggtcatagacctgcattcctatactccgtaaggagtactgtcgctgtagaacctcagctttctccaccccactcggcatagcacaagacctccaatttcaactccgatacaaaaatcaattcaatacacaacttaagccattggataacccatctcactacatcgtcacacgcaattttcaagcccaacctaagatgtctctggaaatccaccccgcgtctcccaaggacgcgcccgaactcgcgcaagtcttctacgccagcttccgtaccgactgcgacaaaaccatgttccccaacacgccggacgtgacagaatggttcgaacgcttttttagcgccgacatcacgcgctcaattgaaggcgagacccgtgatgtattcctcaaggtgacggaggggtcggaggatggcggggatcggattgtcgcattcgcgaaatggaagtttcccgtgcctgcagatcgcaatcggcatgaggaacagatcgtgtggcctgctagtagtgataaggaactatgcgatcggtttttcaatggtatggaggcgcgacatgagaagtggatgggggagaggcctcattattgtacgtttttctttttcttcttcaaatctttgggtttggtatttctcgagcagatacgaaggaacaccactaaccgttatagatctggatatgttgggtgttcacgcttcctaccagggcaagggactgggctcgagactccttaaatggggtctcacacgcgctgatgctgaaggcttggaggtttatctgtccgcgtctccggctgggaaaccgttgtatcagaaatatgggttccgggaggttgattccttctcgccgtaccccgattacgcgcaggtggcgatgatacgctcgcctaatagtcaaatataaccggattatttcaggaagcttagcacgctagaagtagaaaaaccgggacttcaaagcaaatcatcatttatcgctgcgccatgtcttgaagtctcttgtggtgtttaaaaaaaagaaattaggatatttgtgcgggatctatgtatacttattgttcttcaacctaaattagcgaaaaaaaacaagggtgtggttaatatgggcaagtacgttctatcggccgatctgcagaacttttgcggccctcacatattcttgccatctaatcaaaatgacatttcgcatgacgcttttagcatttccatattagattccttcaatttaaaaagaagaagaagaaaaaagaatgggcccgagcccgggatcgaaccggggacctcgcgcattaatgctttgggttaaccctaagcgcgaatcataccactagaccacccgggcagttgatagaataaggttcaggactggggcacaaacatggagagacatattgaaataccaaaaagagatattatcgctgctttgaatatcaattgctttgaaaaataacctaccgacttagggtgaggaagctcaagcaggggagcaaaggtctgccctagcaatggaggttggacatagagagaggaggttgcgggcatcaagacatcaagacatcgagagatgaagtgaaggtggtatttccttgaaccagaaaacaaggtccgggctaaagagtaggggtccggtatgatattatatatcaaaggtgtcatatatcatctccagggctccccaagccaagaagccgcttataaatccaatattgggtccacttcaagactgcggggtataagatggagagatcaaaacttgttcttttttgattggaaagcaatataaaacgtcatttccaaggctatctaaccccaagtatcttgtgtctttcattcaaagtattcaagtgaacctgtaacgccgagcttcccactttcatccccttggatatacaaaatgaccaaattattcatgtgagactctatctgaatataaaaaactaagcttctaacaactccatagtaccggtgtcacaggctacatcggcggtgactctctagccacacttgttgccaaccacccagagttctcatattccgctcttgttcggaccaccgaaaaggccgaacaagtgaaggcccagtacccatttatccgaatcgtaatcggagacctggatgattcagctttactggagcgagaaagtgccgccgcggacatcgtgctgcgtaagtatccaactcgcccccgatgcgaggagcatcctatccgcattctgctaagcctgcaaaacagacactgcagatgcgtcagatcacgtgggagccgcgaaagccattattgccggcctggtagccggccacagcaaggaaaacccaggctacttgctacacaccggaggaactggtatcctgtcctgggaggacagcgacaagaaagaatacggaaatagaagtgagcacgtgtacgatgactgggatggggtggatgaactactcaatctgccagatcacgcattccatcggaatgtcgaccagctcgtcctccaggctgcagcccagcatgccgatgtgctcaagacggcacttgtttgtccgcctacgatctacggtacgcatttccagcaacggaaagaaagaaaccatttacttattttcagcaggcaaaggaagaggtccggttaatcaacgttcgcgccaggtgtacgtattagcgaatgtgacgctccgtctcaagaagggcccgataatcggtgccggccagtcactgtggaacaacgttcacgtcaacgacctgagtgacgtctatgctctactagtcgacgcggcgattgcgggccgaactgatgacgggctctggggtcctaaggcctactaccttactgagaatggggaacactgctggggtgagctagccaaagctacagcagaggcagccacgaagctggggtacctgccagaggcaaagaccgaggtacttgaccctgttatcgctaagcagtatggaggatttgagtctcttagttggggcatgaactctcgtggtcgctcacagcgggcacgcaagatcctgggatggaacccttcgcggcctagtctggtggatgaactaccggagattgttcgtggcgagtgggagcgactgcaaaatgcttcctagagcagtcgtttgacatgtctcttctttgtctcagagcatgttgattggaattggtgggtttgaagtgaaagaatgcggggtgaccccgagagtttgctgggtcttatatcccgatcagcatagaatgggggatttgatgcgagacctagctatttaaatgttgaccggggacatttcaacttggctagagccagatcttcagaatcgagacatgtttcacccctcgacaatcaagcattatggcttgggctttctagagtggcacaagtgtaaataccagactcgactcgagccctcgagtatttaaagtctggtctcgtataataaggcgcagcagcgttttcagccttgtataagccagccggtgtagggatagtcgggattgagatcccatcaactcagcctgggacaatcataatcccgaccagcgggccgcataatactaaaagaggaaggagacaggactgatgcataatcatggtattcatgcattcacccggccccgactggtgagacggcgaaatattgcgccgactgttgacaagccaactgggctgatgcagccaatgaatgctagccatatccaacccaatcagagccatcctagagacccttgagactaatctcgcgattataacgcgaggattcaggttatagccagcggagtcggaaattctggatcacgacggagcaatatttcgccctgttctaaattgtatatgggattttgtcaattccgcgtgccgtggacatgtgttgtactcgatgctgtttatctatttaccatgcagattcccatttcaatttcttttttttttcttctctagtaggagcttatacatttattaacgttccactcatcttctgatcgctagattgccgtcgccgttgatctatcgccatggcggactcagatttcccattctatagacccgcgaggtccgaatatgccgataacacgagcagagcatctacagacgtgaaacggaaaaggaatgtcgatgaggataaatttgctttgggtcggggaggaaaactagtcttctttacattgtctgttctcaccttgatggccgctttggacggaacttcgctgtcggttgctttacctgtgagtgcgtcaacaaatgatttgatatgttgaaacttaccaggccaggaaattgcaaaagagctcaatggaacggctattgaagctttctggagtggaacttcgttcctgttatgctcaacaggtatgtggcaatatgttacaatacgatcaaaccctttaaccttgccatagtattccaaccgagtttcgcctccttctcgaatatcttcggccgtcgacccatgatcatgatctcccttatatttttctgtgtcggcgctataatcgcagcaatcgccaacaatttcacctacatgttgatcggtcgttccatccaaggtgtcggtggaggcggtcttatatccctaagcgaggtcatcataaccgatctcgtccctctgcgatggcgtggtcagtacttcggtatcctcagtgcaatgtggagtctcggatccgtgacggggcctatcctcggtggtggattctcggaaaatgtgtcttgggttagttgagctaatccatttaagctccgcaagtatttatgctaactacgaatagagatggatcttctatatcaacttcccattcatcggagtcggcgggattctcgtcatcctattcttgaacctcaagcttgcccccagttcattaatcgacaagctccgtcgcatcgattatttcggtaccatcttgttcgtcggaagcgtgtcatccttcctgatccccctcagctggggtggcatttcatacgactggagctcatggcacacacttgtaccgctttgtgtcggaggcgtagggctggtcgttttcggattctacgagtactacttcgcctctgatcctattgtcccgcctgtgatattccaaaaccgcacggcggtagcttcgttcattgggagtgttttgcaaggcttcatcctatggtgtgccctctattacctccctatgtactatgaggcagtgaaggagtacagcccgattatctcaggcgttgcgctattccccgagacattcaccgtggctccgagtgggatggtagccggcatcctgatcacggtaacgggtcgttacagatgggctatctggctcggatgggctttttcgactgtcgggctaggcttgatgtgtctgatcaaggtggagaccagtatggtcggctggatcttcctcaatatcgtgcctggccttggattgggcattctcttcccatctctcggttatgcagtgcaggcctctgcggacccggagaacctcgctattgcggttgccatgtttagtttcttccgtgctctcggccaggctatcggcgttgctgtcggtggtgttgtcttccagaatcgcatgttcaccaacatctccaggtatgctgatttggcgcctatggccgaggcgtacagcaaggatgccgctggcttggtccaagtcatcaaggcgatggcagatggcgctgataaagcgaatctcaaggaagcctatacggacagtctacgcacggtctggatcgtctgctgtggagtgtctgctgtggcgatggtgataagcttcctcactgagcattatgaccttgaccgtgcattggagtcgaaccaaggacttcgtgaagaggatgatgatgatgagtctatcaacagtttgaaggacttggagatgcgggcagaccggagaattgtcacggagccccgaccttgggcgtggtagtggaagtttttctgacatgattgatggagatctataatgtataaagtaatgatatttactgtattgaagttcattcctagtacagactgttctcttgagcaaagtcttgctcccttcgtctctcccttcgtctctccctcgtagtctagtgtatctattttcaataggtgggattcatggacaatatatacatcggtgggatcttcgattaccggtattggggggggggggttcgaatgtgccgtgnnnnnnnnnnnnnnnnnnnnnnnnnnnnnnnnnnnnnnnnnnnnnnnnnnnnnnnnnnnnnnnnnnnnnnnnnnnnnnnnnnnnnnnnnnnnnnnnnnnnnnnnnnnggggggggggtgtgggtttgcgggggggggggggggggggttcgaatgtgacgttgccggggctcttttacggctagatgcgcgggaaagcttcaataaggaaactatacaatacgcaagatcccgaggagcaagcgggtttaaacatacggattagaaaggacggacgccacatgggcagtgatacgagacagtgcaagacatgtacatttctgcaagtagccgaaaaagaaaaaaacgctgttatacaacgatatcgacaacctggaagctgaacttcaaacattcgtgatcacatcccacaagaataaacataaaggatcacatcacagaaacaacaacgaatggtcgtgacatcgtaaagtagccatggtaaatagcagaaggagtaaagagattggatcaacgaccaagtgcacgtagccggtctttgagtagctgcatttctttgtcatattccatcccggcaggctttgtcacccggttattatctttgatcatcatagagcggtagcgaccatcgccatctggtgctccaacagtcacccagacaaacttcgttccggagctattgggctgcgaacgctcctgtgttccttgccagaatgcttcgtcgggtacggattcatcagcagaagcggggtcaaccgagggcgcacgacccccaagtcgcccgaattcaatccaaactctgagggtatctttgatgaaggtgattttctgcacgaaggcgttcgcatcaaggatgtcccggatgcggtcttcggtcgaattgatggaatctccgcccgcaatgctgaggaacgtagcagcctcgtcggaggccacagcccgagtgtcgaatcctgctgggtgcatcttgccttttgcggcgaagtatcgagcggcggaggccgagagatggtagaagtcgacccagggggatgagctacgggtgcggcccggcgagatcactagctttgtgtggtcggggaagttgaactggaaggcaccatccccaaaaccccagatgccgacattgcccaagcgctggtagaacttgacaaactgggcactgttgtgttgaggtagatcttcatccataatcccctcgtcgccatgtcgaccaagggctccgatcatgtatttaccgaactgatccacaagtttcatcctcttgattttctctgcatcggctcgttcaatctcggttcctgtgttggaacgaactctcattgccttcgagcttttgacatcgaacagtgagggcgatatcaaagctcgtcggatgccgcggcatcctagcagatcatcgtcacagttctcataaaattcaaccgaggttccagtgcgaggaactaattgatcagcctcggaatagtaaattggcttttgcttgccatccacgacgctacgggcttttcggcggatatgtctctcgccatctcgaagcacgacactcgttgccggctgcccgttttctgccttgaaaacacatccaacgctgccatcatctagaacatacccaataccataacggttggtatagtcgacccatttgatgacataggcatggggctgttttcgtgctccccctctgcgtctacttggtgcgtggtcgaccaggttggtcagcatgagacgcaagtcggtgttgacatcggtcaacgaagtcctgggtagaagcttgcagacatctgctgtgtgaaatataggactgagccccaagctagagcgggctctagtgccagccgtcttgccgtcagaccgagcggtaccattggagtttgatcgaccatgtccattagattcagaaaacttcgactgtgccagtgaagatgggctggctctccctctgtcgcctcgtccagcagtagtgttcagatctgctttggatatagaccgtagggatttctgattggcgatcacgtttcgctcctccagcctagcggttggttgtcgttctctggttgaaatagaaggctgcatcagctcctggtcagcagctgccaatctgcgagactgagagcgtgttttgcctacagtcaagcctgatggcatgcttgtggatttggctaatcgtggagcaatatccttgtccttgctacgcagcgttgctgtcgctgtcgctgcttgggtagcggatgccatccttcgtgtccggataggacgctctgcgagccctccaattggcacttccacagcgggcagaggttttggctcggcttttggactatctcgatatggcctggaggacagaacagcaggatcggggaccacaggtgccctccgaggagagataggtggcactcgagcttgctgtcgtagcgttgcggcatggctttgtccttccattcggcgatgttgagcagcgacgagagcggcattggtccgtgacgctgccatagggttgggacgagcagaaatactccgattggacatagtgctgcttttaagcatcgactcctcagggcgcattacctttcgggacgtctccaaaacacaccagtctccatccaggtcttggggccatcggtaaacataatccggcgacaagggtattacgggtcgcagacctctggagtcctccacatcacactcagaaaaggccgactttgcgcaatttctgccaacggatttccgagccgtcccgtcaggcttgcgtcccacgccgcagagtgagtagaaggccgctttgcaggaatgatatcgctgagcggggtcgtccacctggtacacgtacgcgcggagcttctcatccgagtccaagccgtacccatgtaccacagaatcgccttgaggtgaagcgtccctgagccatagtggcttattgaatcggcacgaggggtctagttgacgaggaatgcaaccctcatacatgttaaagaatgggtgctcaacaatatcgtctgggtctggtcgctcctcgtccaccaggttcaagcaacgactgactagatcttttgcttcctcggggatgtagttgctggactctgattcattaggccagacgtaagtcagattctggacttttttgtaaacttcatcttgggttttggattgaaagggtaagtatcctgcgagcatggcaaagctaaatgcgaacattagttcaacgacttcctagtaatatcgcggtgttcttaccatattacgcccacggaccaaatatcaactttctgtgtatgcccgcctttgctcttgtccaaaacttcgggggcgatatagttgggtgtgccgcatagcgtgttccgtcgcttggcatccttgtcggacatgatcatagccgccagaccaaaatccccaaccttgatgttcatgttgtgatcgaggaacagatttcccatcttcaggtcacgatgagcgacgaagcgtttgtgtaggtatttcaccgctgcgcaaagctgaatcatataccggcgcacttctggcaagctgaaacagcgtcgtttccgaaacatgtccatcaccgagccattgggacataactccaggacgacataggtgctggatccgaaagcgaatgcacggtagaactggacgataaaaggatgacgcattttagaatgaatctggagttcggttcgaaactgcgacaaaagtttaggcactgtcaaatgcttggtccgtatccagaggctcgtaccttctcctccatctttttttgagacatcgctgacttgacgaccttcatggcatacacccggccatttcgagccaatgtaccctcataacaaacagcgaaaccgcctttccctaagaatgcgcctatcgagtatcgctcaccgccatcttccggctctgagactatcgacggtggcggatcggcgtagcttttggacgttgcaagcttctgcttgttactcggaggcggggcatttttatcgaacggtttgcgatcaatcgccaccttcggcttgatcatctggttcgtcgtgcgcggggagagggcctccatgattggaaggtcttcttgttatgacaggcgaaataggagaatatcaccagctgaacgcgtgtaacggaaggggtatcgcgcataaagatcattaaacagtgaccatgtgacggtctgcaaaagggtatcaagttcgggcaatattggtatccctgcaacgaccaagttagacctcagtggagagctgaacacagatagaacttaccaaaatgcaaagcgctaaagaaacagaaatgtacaaagcttggaaaacaaataacgacacctcaatcgagggttggggaaggatggtgaataaatagtcggaccataacagtttgctcaacgcggtaaacaataaacactggccgttggcccgtgtggtgtggtcacgtgagccccgttgccagcgcattgtcttcggtagacacatacccacatagtggacatgtgtagatttgtctaaaaatatgaagatattcgatttagcaagaaactgtttggcttcaatctcgatgtgtttctagggctttatattagggttgacaataagaaatgaagtacataaatctcagccgcgaatttaactttacgaccacgaagtactgtacatattatccttgcacttttattggctcttaaggttgcggctatagttctcttgaagttgatcgaaatggggtttatccttagcttccagagtatatcttactgttgtatacatattctctatactaaattatcaacaagcctgactccagtggcatttcatgagaatttgccccagtacttctggcattgaccgctctttccacaccgccgatctattcctacaccccgcgcagggcacgcgtgcgcgatgatgcgcgtagtatagtatgaagttttctattggcagaggaaaagcgggtctcgggccttcccatgtacataccggggtgcaaaccctggaatactaatgaaatatgactgtacagcgggagatcgtacataaaccttctcaaaagcttaagcttaatcttacctagtatgtaagttgtacagagtatctatgtaaaaactcgcagcctatgcagcggccaggtcccatggaaacggtttgagaatatgcaggtctagagttcagcttttactaaagtggatagacaacaaccaaaaaggggaagcccactatcccaacgggctggtttatgactaaatatagttaaaatcatctcactgcccacagatttcggtatggatagataggcaattcagcaataatgttgatatgtggatcaaatcctgatgtttagtctccacaacccagccatctaggtacatgtcttactagcatgtcgtcattatatatcataaacccctctcagccattcctcggccaccacgccaatgaaaccgctaccaacaacggccaatgtccatggattcgccaagtcccgcaaatttggccagaaactatttttctcttcctgccactgttgcagctgcctatacttatctgaatcctgagaccgatagcgctcttcctggctagcctcaatttccttatcgccacccacatatcgaaggaataggtagttcgtcacaggtcctagtatgacaactggattaaatggaccagccatgttgagtagggcaaaggagaaatggaccaaagtgtctccaagataactagacaagcatcagtccatgtcatcgaacgcaaagggtgatatacatatcacgaaaacttacttcggatgccgcaccaaactccaaaccccatgtcgacacaaatccgtccgttctcgtcgatgcagtgcaagctgcgtatctgccatagcctccaacgcaaacccagcagcaaaaagtccaacaccaagtgcccgaacaacattcaccccgtcattgcctatcgggagcgtagctccacccatagtgaacgggaccgtgaacggcaaagagatcacactcaatataacagcctccgggaaaaataccctcataaacccacgtctccaaaagttccgctcttttttggctgcgtcgtaccgcgcatcatctgtcccgcgggacaatgaccggcacgcaatccgagcaaagagtctcacgccccagatagtaacgcagcttagcagaaccctttccgaccatggtagagcctcacaagcttctctgaatgagatcttgtgttttaaaatcgggtgcccgatggcggtccaccaggcattgaggacttgggcggagggccagagccagtctttgagttcgactctgtctgttacttcggctgcaaggtatgttgcgagtgagaggctataatacagactgaatgacggtaggagggttgattttaggattcctacgtcgccgggtgtgatgttgtttctgaaggatggggattggagagcgctaggggcctggttctctaggacagaggggggaatgaaaaatgccatttgggacacgatctggaatactggagggttggctacaaggttaatcaatgtattgtgacttagttgtgctgctcagatgttgatgtcaagattatgtaatggccaaacggagttagacttccgcacggcccagtaaaacacgtggggccccaaattgggttacaaacaatgcaaacactctaactagagttgagcaactataatggacatcgtctcgaagcattcttcggcaaaaaccatgacaagcgctggacagtcacaatttcaataagctatctgaccacgggcggaggccacgggaatttgtaccatgtgcggtctagtagaagtatttcgaactggaattggcttgatatatcgctgcggttgaggtacatgaacggattttatggtttgcctgatcttaagacatccaccagtccttgattctttccagagatgaatctttaagtgtattggatttgcctatgtacatcgatgcccatgaaccacattaccgatttaaccttgagaacctgtacccgcttctgctgctttgactgctctctgataaatagcgacagttccttcagatactataagcatcttttttagttcttcgagctcctctgggtcctcttcgttttgagtccttgttttccaatcgtccacttcggcgcgcgcatcctcaagctttccccgcaagcatgccatttccgcgtgcaccaggttttctccttctagcctatgatctgtatcttcctgcagtatatatacacaaaatgacctcgcttgcgccacctcaaatgcatctccattaaacgcatcaggccacccattttcaaggtacatctcccttaacgaaagaatggacccatcccattccagcccggtgttctccccactacctggaatccattctaaagagcgatacgatcgcaaaatatcccgaagagccgcctcagcatttctgtgcggaatatgctcaaagctattccgattcaacgactgcggttctttcgtcggatgaccttcaagagcgggatcggtcgtgtcccagctctcctgatcaataatccaaatgacatgtcggcgtgcatcatataacatgacgctgccatgattacccaggctggtcaatggtgtgacccagggctggatatacgggccattttcatcctcgaaattcggatccgagggatccccataaaatgggtcgcggcttcgttcggcttgctcgatatccctgaaatcggtaaactcgccgattcgagagaatgagtctttccccgcagcaagcggatcaatatatggtaggatgctgtagagatattttattgatgagtccaggtcgagctcgtcataggcagcctccaggtgggttaggttgtgtggcccgcgcctaattcccgcgcgttgaatatagcgcattctggaaagttcctcgtatatctcaagcataaggtccgccactttctggagacgtgctttttccgagctgagcgttgtcatgatgagggggctagcattgataatggatgttcggtatcgatgcactggaagcgctaccagaacgatgaaagataccacacagatgaaagtgcggaatctcatggcaagaagatatacgatgagatgcaatgccaatgttcaagagctgcgatgggataatgcgcttgtaaagcttgatatattcgcagattacggaatcaaggcggtgagaatataagaactctgatccgctctctgaatattaattaccatagaatagttaacagacagttttgtaggagccaatacttgagaaatactaccgacacggcnnnnncaaaataggtaaccaaagtatatgaagtcatatagccaaaacaggtaaccaaaacatgtgaccaagtcatgtgattatgtcaggtgattatgtcaggtgatttttaggtttgatcatatgatatactataccataataaattacaaaggctggtcgaaaattgcggccagcgggagacttacctgaagtagtatggcgggcaacgtgacggtagcaatttccgcgtgtcggtagcatttctcttctccaatacttaatggtcattaggcatttttttcaacataagcactccttccctaaacaccccagaatgatgacggtctgatattccatctatagaatataaggtaatctttaaagatgtagataatatgagacatattaggagtaagtattcgagtatggcggtcagaaaagaccttggaagaggtattcagtgggtaggtatagctagcctgaattgctttgggctatttgcacatgcggagaaataatggtggcaagatcaatgtgcatattcaaaggctttgattgatccatgtttttgtatttctgcttcatgagaagcatcaactgttcattccagaacggcacgcatgtttcaagatcaggtgtcgagaatgctgtagtttcgttgtcattctcagtatatagattttctgatatattgcacttgaacaagttcgagccggaagataagtcgaccgagagcgttaaaccgagatcatgaaggtcggagccatcaggtatacgttcgaagggaagtcggttggtgggtagtctctttgcctttccgtcctttgtgaaagtttcgtcggtagaatgatcccttgcctgacgaatgaggtatgctcgtggatcacgaggggaaagcgttgtcgcagagaccggctcgctgaccgaagcttgcgacgaagttaacgcagcttttgcggcaagataccgacttttatgaggcgaatgaaattctggagcagactgcgaactcgatgttttctcgttatcgctgacgcgcatccgactgttctgaatagcttccttcttcctcctttcgaagtctagtgctttctccagatctggactgtccgaacaaccatcgttctgcccatcgatatgcataatatctggcaaattgttcgtgggcaatccgaatcgttgctgggtaagaaaagaaagcggtgagtctggttcttgagttggtgcttcctcagtagggcttttctgcagcgagacttgtgttgttctctgaaaccaagtgtctagagcgccgttcccataccggtctcgatcacgttccctctgagcgcgtcgggcgctcgaaatacgattagtttcaggggagcactcggtcgattcttgtggatgctggcggcggcgcttcactggcgacccagatgcaagtcttgaagtaagaggacttatcggggctgagttgggcgaatgctggacaactcgcggttcaccctctctttggattggctcctgcaggctaccgctagatagatccacggggcttgtttgattgaggtaattgtttccgcgacgcggtgtttgaaacgaagcatttattctggacacagaccacggattgacgaagctgggttgcttacttctgacagtgctggaaggaaccgggggcgaaagggcttgcggattctgtgagagaggcgtgcagggtgtagctaaactaaaggggttgtcaggatcaccagggtgtgcggcaagctctgctggcttcctagccagcaaaagttcgaatcctcctgagctctcattcggtttgcaggaattctctttcccttgggtggaatttctcgtctccgttccgtaatggtcgcgaaacatattctctaccaaggccaagactatatcttggtcttcaaacaggatgttgtctttccctggctcgatattgacgtcgtacgtccctcggggacagcgaatttgtaaacagagaaaaggatcgctggactcctttaagacgacacggagatgctgcttgaaatttttgacaatctcgtgggcaacacccctgctgttagacagagggcggccatctacactgatgaattggcctgcattgttgatcttcgccgtatctgatttggttggtaaccacatcaatggatattcaacaagatgagcttacccaattgtatatttttcggaagaaaagccgcagcttcatatcctgtctgatctgatttttctttcaagacacaggaagaaaaaacttccgtgccagctatctttagaactgcgtccgagagcgacgcgtctgcgctcggcacgtagacccaattgctattttcaccttttgtcttgaggactttgaatgagaacctcttcaacggttgagctatagcgtaggcctggagaagtttcttgatcttcgtaagactttttgcagcacccttcaagatagtctgcctgcggacaggtatatgcttgagaaattctgcgatacgaacagttgtgcccacaggatgtgatgtccgttgtgttctgcgatgcaagtttagtagtggcacagaggccaaaaaatctggcgaggtcgacatacccagtaagctctccgtttcttccatacttcaaacatcgtccggcaacttcggactcaactcgagtggtgacagtgacaagcccagacatctctgcgacactggcaagtgcttcaccacgaaatcccaatgatgaacccccgacgtttttgagatcatctaaactttggatcttgctggtaaaggctcgtttgcagacattttgctggtcctctggagagattccgtggccattgtccttgagttgtatgacatccacggtattttgggaaatttcaacctgtaatgacgtggcagaagcatccaaggcattgtctacaagttccttgacaacagagcagggatccgatatggcagatgtggagccaatcgcccggattgtcttctggggaagagcctcaattgtcatcctgcacgcttggtattagttgttggtattagttgttcatctccaaaagcacaaattgtctcatccaggtgaccgaaggccagaaatacatgcgaacgatttcaatggcttatagttgatgaacgtggactcggcgaaggaggatgggaggatgatattgtcttggcatcctgggtcacgttatgctaatgccttattattcaggccaacatactctccttgtctaggactgtgccaatagtgttttactgcacttctgcgttactgtctcttccctatcgcgcaaagcatattccattcctgaagctcatggatttgattattgctaaataatcaagaatgatcttaaaattaggccttttcctgccttttcctgccgtctacgagacctctcaaaagactgctgggtcatgtggttctcaatgacgaaggcctgctcaatgaaactgttttgttgtccaccggtcgctatatcttacctcactctttcaagcttcgaacatggaggttttagggttccgagtttgtacccgcctagtccttttcatcgtaccttttgattctcttcatcctgggcttcaaacggagaacgataataactcgatcactttatatcaatgccggccagcatgatactcgaactccaacaattcccgggtggatttcatcgcccatagtgcctactctagagcgggtgttctgcgacaatcatcgacgaggcacaataggcaaattcatcaaagttttactcgtctcgcctttcagacttctgtgatcagtccactgttacaattactcgacagaggcatatgcaagagacaggagacggactaccatactcgaagaagaaaatcattcctggtgtgtgagtgacggtctcatatcttgaggcgaagtgctgtggataacatcctctatgttagagatgacttcgccgaagcaaaggatggaaatcatatcttataacatggtccaacacgagctttattccttcttgagatcctttcactttccgttcatacgagcatcatccacaatgcgtgcatgacgctagagtcgaaaattgcagctacagcaagtaataccttcacgagtgacacaagtcgttcagcaacaacacagcggattattaaacttgaattaagacgtggcgtcagtgattcaacggcccaaatgagtggtaagctatgtcatagggttcttacccttatgactttgaatatgacagccaagttgaagcaattttatctaaaacatgcaaccttagatgcatacaacaaccttcgaaggaatggtggatgactaaagttctgcctggcaataacatccaataggaaggcacatacagcctcattagtcatcatagtcacagcctcaataaacaacgtccaactttatgcctctgcagcttcttagccttgctcactcaaacggctgaagacgccgaaatgttgggcgaggacttttcaatcactaagctcgcaattcccgccgtcagtgttctaatcgccttcctcgcctacacatcacagtacttgtttctgcatttcgagtctgcgcctctcaagagggacgaaatttggaacatcaatatcttcgctctgtgcatctggatatgctattatcgaacctgctttgtagatcccggtcgacttcctaaggctgaagagcgaccgaaacccaaagagcaagaaggtgaagcactcgctagtcgccagcgatggtgtcgcagatgtgaagcttacaaaccgccccgcgctcaccactgcaagacctgtaaaaggttagataaggaatgcttgatgtggaggattttgctgatcttcttctagatgcattcctaaaatggatcatcattgcccctggacctcgaactgcgtctcacattttaccatcccgcatttcatgcgctttctattctatgcgactgttggcatgtcctatctggaaactcttctctggcagcgtgcatcatttgtatggaagaacagtcatctgccaagcgtaagtaactctggtacttcttttcatcattcatgcggctaatgttgaatagtatctcggccccacgttggggcagctcatccacttgttcatactgctggtagtaaatagtttcacgactttcgccctctttgttctcctgcttaggagtttatgggcaattggatctaacactaccaccattgaaacttgggaaatcgagaggcatgctactcttgtccgtcgagcccgtgtgctgggcgggtatcttgagggccctggaggaattcgagttcacataaaaaagcaggaatatccatacgacattgggatctgggccaatatcaagcaaagtatgggcgggagcgcgaatgtgagtatgcctgttcatggtccaaatattgacacgcaaacacgtaagctaatgtctttttaggtcataagctggttctggccactggccgcatcacctgatcgccggtccggctgggaattcgagaccaatgactttgagggtgagtggttgagtcagtattgtgggttttcaattactgatcttttttagatcctggtgtatcatggccacctccagacccagatcgaatcccggtgccggttagtacaaggtcggataacattagtatgcctgcatacgcaagtattcaggacgagattgatgccttcaatcgtcgtaaacaggaagacatgaagcgattccaaagtccgggtgtacagcgtcgcaagccatttcacgaccggtacaaaaaaggtgcctacgctgaaagtgatagcgatgagtccggaactgactccgggggttattcagaagagggcgaagagtcttggcgaaacgccgaaggagaacgactacgcgactttggggtggacgaggaagcagaattctatgatgaggaagacatccctcttggtgttctcattgagcgacggaagcggcagcaatctgctaattgaaccatttccgacaaaaatcatctgtatcattagatctttttcgcaatacccctgagtcgcacatatcccagccattggctcccatcttcaccacgagttatcacgtcctggagcacatcgcaaacctggcgcactgcagcatcctgcttttcctcggggagcacgtccaagaactgggctcccatcagtctaacccatccctccagaccgcccttggcgtcagtggtgagttttgttgggcggtactctagctcgacgttctcgaccttgaaaccgatctcttcaagagcatttctcatccaggtatcagatgggaagaaccaagggcttgtctcatttgcttgtttgacagggataccctgctgcaccagtgcgcagacaagggccgtcttaacctcggccacattgccatgtccgcccatttcgaatacatatgtgccgccaggcttcagacagccatagattgcgcggagagttgacatgcgcgtcgactcatcacgtaagatccagtggagggctgcgttggagatcctgtctggttgttagaggtcgagttccatgcatggtggaccatgtattataattaaagacatacactttatcccatgatccattgacaatggaggcttctttctccaggtaccggcaatccacaacgcggaagctggccttggggcttgcgtagtctttgttggcagactcgatcatagacgcagatgagtcaatgcccaagacggattctatggcggggaggaagtttgcagtgaattttccatcgccgcaaccgacatcaagcaccttgtctgttggcttggggtctagagaggtgaggagttttccggtgattttcgcggagtgcacgaaggatgcagaggcagagtatgcctaggcttgttaattatgattcacacgtatcgccgggaggaatacatacttcggccgaccagtggtctttaggaccctccgtattggacgccatggtatatgacaggtgcaaatatggagaagtggggaagtcgtagtcttggcgtggaatatcagtcaggaacaatggaaatgatagtcaatcaagacgtgagaatatttcaagagttgttcctagtaaattctttcctggttatcgaaaggtttgatgggctctcttatatgttttctctgtagagtgggcagttattcaaggtaggataacgaggccgatatcggaccggagatatacttggccgccagtacgggcgactacataagtgtaccatcagaacataactctctcattggataatattgccaggcatttagatccacccccaactgtataatcagagctcttccacctggacactgtaatgtgatcatgtacgagcacgtgccctgtcatgtgaccatcacggcccgtgcggtcccgtgcggaccatcctgccggtactccagttcttctgtggcgcggacatttagtaggcgaggcgtatagttgctgttcctagaggagtgataacacttgcttgaggtgttttcggtatttctcgactgaatctgaaaagatcaggatatcaacaacacgttacgtccccttctcgggcgaaacgtaggggtctaagagatgagaagactatgggatgactactgagaatggaaaggtggaaaggtgtttgcgttgctatctatgcctcgggagtgcttttctaactatccatcacatgaccgcctagtcatcctgctctggaaacccccactaactaactagtgtgtaggatggtccgcaacgggaccgcatgggcccgtaatggtgacatgacaggggggatcacagtaactcaaatggcttccaccactactaccaataatgatattccaattgaaaattgggtttttatgctagatagagagtattaaattagataaattcatccggtaattaatcataattatggtgtaattctacgaagaacgaataccagagccctttgataattgtacatacaacgatataaatcctggaacttgggcgaaagcactccgataaggtggtgatctatagcggtgagctactatctaataacagagttactccgtatgtatacttgatcgtccgtacgcctgcatgggatgcacagacctactacgtatggaaggtctagaccttttttcttttcgaataacttcttattagagactgacagttatattcaaactacgcagcttatacgggctgtacgatttatactagccaaaccaattgatatagtgtccgggcacatcacatgtaaggatctatacctacttacatgtcaggattacaagacatcactgcttgcccttacaactaactacgacccatacccctttctctcctgaaatgctcaaacaacaaaagtccagtccagacttaaaactgcaatcatattgggcacctagtgggtacacggaaatggcaatggcgaaacaattcccttgagctccactaattcactgggcgaaatcccccctgacttctgcaaagtagtatatatatcaggatgtctgatctaacaagctgcatattgaaatatacaaaaccccacctcttccaatcaatcagacaccatgtcttaccacggccattgcaattgcgagagcattcgcgtcactcttcccgagcaacccgagacctcagctatttgtcactggtatgaaatcattcttgaacttacaatcatttgtcttgatggtcatgtactaaaatgattctgcaatgtagcaataactgcaagcaagcaggtggtggtcgtaagtacattcgtcaaggcagctgtggagtgtacattgcttacaactatcttagccttctctgtcaactacattgtcaatgaagatgacttgaccgttgaggatcccaatggggctttgaagatctacgaggacaagaattccgatagtggcaatgttgtgaaggtaaatcgttgtccatctcgaagtactattgtttgttcgaacaaaaaactaacctcgaaatagcgtcatttttgttccagctgcggcaggtatggaatacaaattcaagtccagtgataactatagctaacacctattgcagcccagtgttcaccaaaacccccaaggcccctggagtagtcttcctcaagggccccttgtttgacattgtctccactcctgcacttgaggtgtttaccaataagcagtacgactgggtgaatctcaagcagggagaaatcgaggcctgatatcaacacgaaggtaggatcgacatggtggtttgagaaaatgtacaaaaaaatgaatataaacattgtcctatgcgatggcgcaattctcagaaagcctgttattggtccatttttaagcataaaattcctgtcgcatttatattcgtttccacctatagtatagcttctacagagtacggagtaccttggtgatatagtgtttgagcagacgtatgtagatgacttaaagcataacggtttaaatgtggggacgggataatttatttcaacctcccatctctcaagacaacggcaaaagcgcaccacgccgtagccatgctgctctctccgggctaagactacgtataataatatgacaaaagtccctgctcaaacgtccggtcctaggcgaccgtccggtgccattttgcggaacacccgaccgcgcgtcaacgacaacatcccggatccccgcgaagcgctcgagctccagcggatccagacacgtgaggacaacgagctggactactcaacgccgtctgcttcttccggcgatgaatatcacgttgtgacgcgtcgcactacggcacgcgctctcgcgtcacgtgccgatgccgagcgtcgccggcaagctcgaaagggggcttggggcaagctcacccggttttggacgcataatattactctaacagtggcgcataagagcagtcgggattatttcggtgcgtattttgcgactgcgaccccgacttgccgatctgcataattctaactctgcatccaagccttggagagaacattcctcgcttatctgcggacctcccttaccgttgcccaacaaggcgtgctaattgcacagctgttccgtctgcaggcggcggaggagttggcggaccgtcttgggtttggtcaggtcggtacacccctgtcggtcgcgtgtcactgtgtggctattatcgtggctttggttggggcgtatcgattctggaggcagcagaatgctattgctaggggtagggtctatgctggaggctgggacatgaattctgtgggggtattactgggttgtgtgagtggtgcaaatgcttttcggttgaagatgtaactgacattggctagatcactataacggtgttggttgtttccgttgctattatagtcgaggtcgacgttcacccgtctatattttttcgacgaatattagccagctgagtgatcacggagatatgtaagtttttatgaatcttgtcttggcaatcatcagcctcatatctagactatgtaaatataattctattgatttaaggctatgtagcggagaggcactttgaaatacttacatgattcattagttcataaatgtggagttgattaattagtatgtaagattatgcatatatgtactccgtatggatgcaatccttcgcttcatcatatacatgagaggtcgttgatgagaagtgtcgttgttcggaagacgtcgttagtaagaggcatgaagctcctcttcaagaatatgccattttctagcaacctctgcccggtcgtcagcggtcgatgtccgcatgtcttcaatgccttgcgctatccgagatgccataatagaaagctccacgttcttgcctagcgacttttgaagttgtctgcgaattccaaccaagggatatccaaagagtccccagagacctagaatgttgagtcagaatgagattcccgcggcgaaatagccgttgggtgatgcatagcgttaacatacctgctggtggcttgaagataacacccccaatccctttcccgattcccttgatcattcctttcgctccttgttgcttggcgccaatctgaggctgggtgaccagacccgtgataccgtaataaaatccatctcgaagttcctagaaggtcaagggtcagacatgatatttttttttcccatcgaggatgagtgacataccgttccagctgccgcgagtccactacggaagcccataaccttgggcatatctttcaccattcggtcgtggtacaacatcggcgcattgtgaaatcctttggacaagctgagagtcaagtctgtcgggagccagagtatgctttttagtaactttttcgacattcgactaccgtgagtacgtatttcgtagataacaccctgcccatggggtgtctctatataactcaatagtttcttctggtcaatcggtatgccttgtttttggcccacggcactagctggtaactcatggttcattctgttgtgtcttatgtggtccttctcgctgtcgttcgtgtcgaggttcatcaaatcattaccatttgatccaagtccatcatggcactcggcaggcccatgatactcggcaggttcatgatactcatcgtcatcactatccaggcttgaatcatgacttttgcgggatttgccaaatgaaaaccttgaggaaccactgcgatcacgagtatgacctattgcacgaccggcctcgacaaaatccacaacgatgtcataagggacctcaccgatcccagtcacgaagttcgcaatcgctccaactagcacctgagctcctgcgctaattgggccgacaggattacggtatgtgtcatattcctctgctcggttcctggacagttgattagtggtgtgaaatattttggcaaaggccaacctacaaagcgacatcctcgggtttgatagcccccatttcaaccagtactgctgcagcaaaggcactcagcccaatggaagtttgcttaatgtgccacacagcaggacgagtaggacatattgcgcattgtaaagtcttcaagttaagatgacgatgaaagctgcgtactccatcccgcacaccggactctgtccgcatcttatccgcaatttcttgagccttcgcttgagttgaaggtagcaatgctgtcttaattgcatcggtcaacttctcaactgtgagttgcttgtacgggacaggcatcggcccggccccagccatcgccacgattcctccccagaattgttgatctccaaagaagggaacgatgatcgtcggacgtccaagcgcaagccctgcggcagtggtacctgcaccgccatgatggatgacgcatgatacgtgctggaataaccagtcatgtggtatgctgccgacaatgaggatattatctggcacgtcggcatcgtcgattccgaggtttccccagccttttgaaatgattgcacgttgccctgaaaggtttatcgcttcgaacacgattcgagttagcttgacttggtcttgaaccacaattgagccgaatccaacgtagagtggagtgggccctgctttgaggaaatcttcgatctcttttgggggtttgtagtttgactttctaggtagcacacaaaatccgcaaatatctatttgatcaccccagtcggctggctttggcaacaatgccggcgacctaaagcaaactataattagtgaatggtccaaatctgccaatttcgggtcaacccataccacagatatgagaacggaacgccgagacgctggggcaaactcggcgccgtgatcgaatctaacggatcgagtgcgaggcacttcttccgccacgagttcacaagatctcccaatccttcccaaatcagcatatccacaacggaataagacacgaggtttgcgactgttggcttgcaatcctgcgggtggagaacggctaaaggatgtggaaacgactgtgtaggcgaccagggcattctataagaattttattaggtatccctcaatttcacgcctggaagtagactcacgtaaacatcagatgaagtggaattcccagccgctgtgcgcaatgaacatggcccaaactgggcggattggcgattattgcatcggcaacaaacggcctccgacgataatccacagtgtcactccagagatcctctttgatttgatgcatatctgtgccgtcgcctgtttcaatacatgacctccaacagccgtatataatgtccttcatttcgcgccggcgtttttgtatggcaccactgcgaatcgtgctgaatgcggggagtaaggatgggttctcgaccatgaatgccatcagttgttcggggtctccaccgatgctgaagaactccaagccgccctcaagtacaaaatcccggaaatagaggtgtgttgccagacgtacgcggtgtccacatgccttcaactccttccccagcgcaatgaacggctggatatcaccccgagatccgataacttgtatgacgatgttcagcttcagtgggaagtctttgcccttatccttcggtattggttcaggggtcggtttgccctctagatctggtggccgagttgtcgtttggatgcgatgtaatagccctgctagttgtggcatatgctcgttgattttgatatcaacccttccatcgtctaccagcattaccgttagcgacggtttgtattgcttcacttgatcacgaactcaagactttgaccccggcatttcgcccctctccactgacatgcttccgttcgcggtgtggggagatcggaacgctgacctccccaggccagtcctccgatcggattgacccatggcgactggatctgggcctcaaagttgttgatgccgagtccattcttcgcgggagatcgacgatgtggccaactagagtgacacagttcaaaattggcaggggggatcagtgtatgttacactaaattataaatagtaatgagtatgttcatattagaattgtttagaattggtcacattgtgcgggatcaaagacattaaaaaagaatatgatcagctctactctgatgatgtcagaagggtccgcagtctattaccgccggtgcgtcagttcggattatgccagcagtatagtttgtaatacgagttttatacatcttaatgttatgcataacttatcttgctgctaatacccaatgctataacatttttttttcaatccgtacgacttgatccgttaacttatagtcatgatatagaaatagagcaattttctcttggaagtcatgaaaggccggtgagcccggtcaaaatcttgaaaatgtcaagtgacggtaatcagagtgccgcagtcccgagtctcaggccttcccggataattccactgcggatcccgagctcgggatcaatttggacctcgggatccctatggattagtcatctttatatgcagcccttgttggacattctcttgtgcaggttatcgaccgaggtcgaagatcattgctatccatgttttctatttcgtgccaaagattgtctgagacattataggttgcacacttcaagctgtgtctgtagtaatgcgctcggtaggatgagctggatccttgagctacttgtaatagaggtcgacgctctggatcgagcatattatctgcaaacttgcgtttaaacttcgaaatctcgcaattttcgagcggaattaacgggaagatcttgtattggcttatcatcggaaattttctccgatatcaagccgaatatcttccacatcctcgtcgatccagtcgatccattctgttgccttgaccggctggtcagcatcctttgtctaaggcgtaccatcgaagcggatgagcggttcgatgcttatgaacatcgaaaagctcttctcgggtggattcaaccgttcattgcaagtacgatgttcagccgctgagattcttaggtgtctccaagggtgacaggttggtctcccctcaggacatatattgacagctcctgggcatagagaaggttgctttggtaaaacatgttgaatttaagaactggggatgggagcgcttaactttcctatgtaggggcagtccagactccaggccaagatccgatgactcatctggatccacccccggctccggggccccaggaccgccacccgtgggtgggttcctttctccaacattggaggacctgaatgatattggctatagcacaccatcctgaggtagctttagataatgaacagagcactctattggccattcttaggtgtattttatctctaaactccgaaccttgactgcgatataggaagattaagatctgaggcatagcggtagcacctgaaccttttggactcatattaggccataggctcaaataatgggagcctgctaggagaagcaacccgtggccctttagccattgctttgaatggtttatgaatcaatcaaatcatatcatatattctatacagtctgaaatagaactacatgatcccatggatcttctagggctgcatgtagttatgggcatgtcctagttgacattagaagcttacgatctcaaagcactgatgatgtagtttagtatgctgatgtgcagtctgtatcatggttatggcttgcgatgtatgcttaatacctgcggtttttcagctcgcgccattctaacgagacgtattagttttcggctggtatcataaaccgacgcaatagccgtgctgaccttggcaaaaagaagttcgggctcatgagccgactccttcgcaagccacacagtcgaaaatcccatataacttgccttgtgatggacttcgtagcttataggtggatctgccgggtttgcgtcttgatgactcctgtgtatagaaaagattattttggcgcagcacacctatatctatgttcaaatgttgatcaactgagggcagggaggcacttagtgtggagtgaggacgtcatgggctgagaagtcatacgccataaatcagccaagttgcccagccctgcgggaggtgccgaggtttgctggtttatcggacaagcgggactggcccggggtaggacccgaaataccccgtgatcaccgcatggtgtaccggatatggccagcatttgattggttaagtacacaaattcaccgcctcactttccttcgctccttcaatgcccctattttatgttctgatctgatatatggcttacggtatgagaggcgttagggacatcatatgggggccctttggaactctgtttagaattcgttttgggggctttttgaggggttttccccatcttggtgttatagctagaaggatagagaagtttatacatgatatacatattcagaaccagctatgcagaaattgaaacatacatggctggaatggcggttcaaaatgaagagttcctgctaaacgactttgcaatataacatgcgatatcaggatcttaatctatcgtaaatctggagatgttcatcctctaccaaattcaaacccaaccaaccgaccgttcaaccaattagacaacggttgttcaggtgcgctgctatctcacgctgtacaccgtctgactgaaggattggaaactcattggcacccgcagatcacttccgaactagacagtcatgatattcgtggggtgccttcctcgccaatgatactgaaagcggcgttttttaccggctatgggaaaatggtgtccgagccggaaaatggtgtccgacttggtgacatcccggggccccgcgaaaagcctcgagattcatggccaagcgggtcttccccgcattctctcccggccgatggcgtcaagtcccaactctaagtgtcgaatgcattgtacgttcactctaaagggggcaaaagagttggggtaattgtagtggctgtggttggtgtaccgttgaatgaaacaaggttcacattccgcagttttgcttatatttgaaagatatcctccattgtttctttctcaattggatactaagagcctttcttaggacaactacctcattcttacccactttaaatatcactgcttcttagctaccgggcttcaaggaagaccatggcggacaagaaagactccccagagagcgaacattttgaatccgaaataaaatcggaccctactactctcatatcaccccttggatcagaaagaaaaccatatggcgaaactggtattgcttcccctactgtctctatactcatcacatactaatctaccgtcgcaaaacaggcctgaagggcatcctcacaaacaagtatgtggcagcatgcgccgccttcgcaaccctgggcggagccatgttcggctacgaccaaggtgtcatctcaatcactcttacaatggaccaatttctcgaaagattccccgaagttggtcccgatgcacccggcgctggattccagaaaggaatcctcactgccatgatcgagctcggagcctttatcggagcaatgaatcagggatggattgccgacaagatctctcgcaagtggtctatcatggttgcagtgataatcttcctctttggatccgccctgcagacaggagctatgagtttctcaatgcttgtaggtgcccggtttgttggaggtatcggtgtcggcatgctggccatggtggcaccactttacatttctgagatcgcgcccccggagattcgtggtactttgcttgttctacaggagctttctattgttactgctattgtggttgctttctacatcacctatggtacacgatatattccgagtgaatggtcgtggcgccttcctttcctcattcaggtatgtcttctttgttaaccatgattttccctaccctaaccaccgatagatgattcctgccgtattcctcgccgtcggtattccattcctaccatattcacctcgttggctcgctggccgaggccgagatgaagaagcactcgagtctctctgcaagttgcgcggtgtcgaccctactgacgagcgcgtcatccgagagtgggttgagattcgcgccgaagttgcttactgcaaagaattgagcgttgtgagacacccaaagtgccaggatggaagttacagcagccgtgctatgcttcatgtctggagctatctggactgtttccgcaaagggtgttggaagcgtacccatgttggtattggactgatgtttttccaacgtgcgtatctgtctgtcgtggtctaaccaccactttctctccttttcctcctcacagaggctaacccatatccttctcgcagaattcggtggtgtcaacgctctcatctactactcgcctagtctattcgccggaatgggtctagactacgaaatgcaactccacatgtccggcgtcatcaacatctgccaaatgctagcctgtttctggtcactatggggaatggacagatttggccggaggcctttgctctttggcggtgctgcctgcatggttcttgcgcatttcataatcgctgtcttgatgagccaattccaatcggactggcctgatcattccgcagagggctgggtttgcgtcgctttcttgtgcttcttcatgcttacctatggcgctacctggggtcctatcccttgggctatgccggctgagatcttcccctcttcgctacgtgctaagggtatggcatactccacaatgtcgaactggcttaacaacttcatcattgggcttatcactccgccgcttgtgcaaaacactgggtatggaacttatgcgttcttctgtgtgttttgcaccctgtcgtttgtttggacgtggttcttcgttccggagaccaacgggaaaactttggaggaaatggactcagtctttggggataacacttcgactgaggagatagcacagcgtgcgaggattgaggctacaatctgggcccatgctgccgcacggtctgatgggctcgaaggtacccagcaaattacttagatggctgactttgcttccatgtttctcgaagcagtgggtgtctgatttatttctgatttatttgtgttgcttatataggtatctatgagggcttgctctcatgttataatcttctttgtccactgtagattatgaagctccttttttcttccgattttctagagtatcctcgctaaatttcccaaagaaccggagacaggccaacgaccgaaatgcacgatgatctcttctatctgatataatggctgtctatgtaggtaggcttctcaatcatccaagccatacactgtcaggtcctggctcatcttaggaagcgcccaaacagcacactccttccctccgaaaaccttcaacttcctctgtccccgaaactcaagcccgatcttctccaacaccctcgcactgtgcgtatcatctttaccacagaatccaaaaaccgagtcaaccccgagttccctcttcgcatacgccagcaacgcaagcgcggcctcggtggcgtacccctttccagtctcctcgggcagaaacgcatatccaatgtcaggcaccagataagcattcggtggctcgcctctcatcaatgatacggtgccgataggggtactctcggccaaagacgcgtgcgcatgcggcttcagcgagaccaggaacatgccatagttgtttcgggcgtagtcggcgtgcacgcggtgccgaaggaaattggaggctttctctgccgtggtgatgctggtgcgaccgcatgttttcataaactcctctgtattccatagcttcatgaggaaaagacagtgctcggtagagtcggggaagaagtaggagatttggaggcgttcgctctcaattgagaacgtgggagatgcctcgaatagagagcccatatttgcttgtttcacgttcaagtgacgtagtagctgagttgtcacggaggtggtaattgattggtaagagtgagagttgtgacaattgagaaatttagcagtagcagggatgtggtattggttacagcagtaactggtgggtgcttgaaacagaaatttattcccatgtgatcgatgcggctgagagatagggcgttagcttaaaccagctgacctatcctgggatatccttgccttagatctatgtagtatcaattgtccaatcagactttgtaatacaaattagaaattctcgttatccgtcgggagtccgactggtaatactagtaaatactattttacgaatacaaaaacaacacaatgatttccgagcccttgcagaaggaggggtacgtcctatcctgaggtcatattccttatcgcaacacgttcatctcacattccaagatgctcaggtgttatcggagtggactcgatctgatcgggttcggttcgtgccgctatccgatatccccgcattctggtaatctaggtaatattaccatgaaatacggaataaaatacatcaacagtatcctgaggtctacgtatagtacgtgaggtattgatactgaaagaggctgaagatagaggtaaatgtgggtattggtaaaataagcctcgtattatttcaccgagtgtagatatcggtagaatactactgcagatcagactcctgtcttttagcagcctgccatttccgcaacgcgtcaaagtcaacgcattcatggattactccccatcccagcccgccagctgtcagctctggtgctgtccccggtggactagcaggttccagaactaggaaatcaccgcatgtgattgagaggcggagatattcaaagcagtggtcagtatgctctgtccaggccgctgaaattgcgtccgattcgttgacaggttgattggtttgagactcatagtggcgaaagcgccgtcgaacaacattctaacggacagtaaaggttagatttattgccattcctttcgtagaaactattgtgacttacgacacagtgaagttggtgaagatttgacaggacgtagaaccgctcatccgtattatccatgttcaaaggatcagaaataccctgggctaggccataatccgatggattttgcagccagacggaatcacctcctggggatcaaagttagttttattttgccatttatctggcgagatagccagcttaccgcttgtgatttctttccaggctttatcgacagcttcaccactgccatagtatttgttgtcggggacaaatgggatttttaatcgctgctcaaaaacctcgttgggtataggtgtctttagacgtagtcctggaacaaactcaggcgtcttgaagaatgaaacgctggtaaaacctaggacaattcctagcccaaagacgacggggagaagaataagatatgccctgtaaattcttctggatacatgagatcgaagtctggtgtcccctaacagagcctcactagaggtagctctgtcgtcatcgacatgttggtgtttctcgtcatgtacactcgtaagtgtataagctcgcgacatagtcgatgacagtatactttgcagcttcatttagctgtgattgaagatgtttatagtaaaattatagaacactttcagcgaaaaggaaaaaatttagaaaaattaagccgcaatgatcgaatgcgtcggcagagtgggaaatggatgttttctaggtgtccatcttcgaaatggtcagagattcctatctcaagacctgcatgtaatagcgcacaagggttctattgatctacactaacagggattactaggtgttacgcccaccccactgagcggaaagatcggtgagtattaccggcattcatcgtaatttgggtactacttatttcaaatatataactcgtgcgattagtctgatatgaggaatgtttcccaactcccataaaaatgtgagataggtagctagtgatccctagcttagtgcatgttaaggcacatttcaatcaatgaggaaattgtggactgaggagaggcagagtcgggacagctcatgtaacatcacgagaagagttgaagtagttggcctgaaaagggatcgcccctcacctcacatctatgtgcgcgctgcatcaacacgatgtttgattctcccgaaaggaggcgagaacacccgatggcaacacgggagtagttcagctcataggcttaatgcaaggtaacttgttgcctacatggccacataggatgtggttcgcgtgtactggggttgccccaggtcgattttataaatacttggcttcttgaccacctagaatgcatttcttcatcgacgtcaatatcgaacttcaaagtatcttcttcaaatacatctgaactctaagtctaagcctacgaattgtgagatcaatgctaccaagttaattttaaacccagtatacagagactaattatacatagtcttcaatatgaggtttatcatcgctcagacagttttggccgttaccttggctgcagtagccagtggtctggccatcaattccgaggccgcggagccggcttgggtttggtcttcggcttccaaacgcgggcctgaagaaaatgtaaagcccgaaattgcggagccggcctgggtttggtctcctaagcgtgatgccgaggagaatgcaaagcccgagccggcctgggtttggtcttctaagcgtgatgccgaggagaatgcaaagcccgagccagcctgggtctggtcttctaagcgtgatgccgaggagaatgcaaagcccgagccggcctgggtctggtcttcatccgccaagcgcgagactgaagagcaagtaaagcccgagccggcttgggtttggtcttcggcttccaagcgtgtagttgaagagcatgaggagattgcagcataagggcttcggccagctgaaacgatggaatgcttcaacagccagccacgagagacgaatccaacgaaaggatgaatttttgatgacaactaaagtgggatggtgctatgtacctagcttgctctatctttatttctgaattgactcccataaaacatttcggatgctgaacaaacctccaaacgtattagattaataatttctggaactacactcatttatagaccaacatgggacacagacaatgacagatgttcccacattacttagatgatctataccaattttagtagcaagtgactgtaatgtctcctaatagcaatatattagtaaaaagcagtaatttattaaaataagtcagcattttatctatctattttaggtaatccttagtataattatactagtgtagtactaaaactagtgctgcggtagtgctgcagcactatacaacagcaccaaaattggcttagtcccgcagtatctcgcagcaccatatcgcagcaccaaaattgccttggtgctgcgggacttgtcaagctctattcattttaaccaagaaaacccttgctgtaaacttgaatatgtcaattgaagcagagtaatagcaggtagaccgtgtctattggtgcagcgaccgcccaggtgtagaatttacgggacttatctggtagatatcagttgatttccagacagcataatagccttggataattcttgttaattgtatgatagagagagtaagatctatcgattagaagtatctctaaaaatagaggctattttatcctatgttcgagagactaatatgtgcaatgagaaaatcaataacnnnnnnnnnnnnnnnnnnnnnnnnnnnnnnnnnnnnnnnnnnnnnnnnnnnnnnnnnnnnnnnnnnnnnnnnnnnnnnnnnnnnnnnnnnnnnnnnnnnnnnnnnnnnnnnnnnnnnnnnnnnnnnnnnnnnnnnnnnnnnnnnnnnnnnnnnnnnnnnnnnnnnnnnnnnnnnnnnnnnnnnnnnnnnnnnnnnnnnnnnnnnnnnnnnnnnnnnnnnnnnnnnnnnnnnnnnnnnnnnnnnnnnnnnnnnnnnnnnnnnnnnnnnnnnnnnnntttggtcttctaagcgtgatgccgaggagaatgcaaagcccgagccagcctgggtctggtcttctaagcgtgatgccgaggagaatgcaaagcccgagccggcctgggtctggtcttcatccgccaagcgcgagactgaagagcaagtaaagcccgagccggcttgggtttggtcttcggcttccaagcgtgtagttgaagagcatgaggagattgcagcataagggcttcggccagctgaaacgatggaatgcttcaacagccagccacgagagacgaatccaacgaaaggatgaatttttgatgacaactaaagtgggatggtgctatgtacctagcttgctctatctttatttctgaattgactcccataaaacatttcggatgctgaacaaacctccaaacgtattagattaataatttctggaactacactcatttatagaccaacatgggacacagacaatgacagatgttcccacattacttagatgatctataccaattttagtagcaagtgactgtaatgtctcctaatagcaatatattagtaaaaagcagtaatttattaaaataagtcagcattttatctatctattttaggtaatccttagtataattatactagtgtagtactaaaactagtgctgcggtagtgctgcagcactatacaacagcaccaaaattggcttagtcccgcagtatctcgcagcaccatatcgcagcaccaaaattgccttggtgctgcgggacttgtcaagctctattcattttaaccaagaaaacccttgctgtaaacttgaatatgtcaattgaagcagagtaatagcaggtagaccgtgtctattggtgcagcgaccgcccaggtgtagaatttacgggacttatctggtagatatcagttgatttccagacagcataatagccttggataattcttgttaattgtatgatagagagagtaagatctatcgattagaagtatctctaaaaatagaggctattttatcctatgttcgagagactaatatgtgcaatgagaaaatcaatgaccttgtcatttctgaaaaaaaaagtccatggcgcctaaagcctgtatgagggactggtgtgcatttttctctctcttcaacttgcgacccaagcttagacggctttccaccacaatatctcagaacccagtcccactaattgaccaccagatatcaggggtattgtttagaattgctgtaacaaccggggcatcgagttgcgtgaagttgattttgaggggcggagagaagcatcctcggtgaggggaaaaaagggagggggggtttgaagatatttgaagggactggggagagacctaagggacttgaaagccattttcctcagaaggttgatatcggaggagtttggactctctagtactctcctgtcattccaatatagccgttcgtataaccctaaaacggagactattaccatacggcatgggcttctccatttagcccttctcggataatctgaacccatgtttactgtcgttctcttgaaacagtccacttctggttgcgctgtggggctctagtgctggccctggtagtaaacgcgggttcagactgtctaagaagggctaaatagaaaagcccttgctgggcggtaatagtctccgtttgggggttataaggacggtcatattggatgacaggagagaattggagagtccaaactcctccgatgtcaacctttctgaggaaaatggttttgtcgtaggtcgagagaaaggcgtgcttggtgttcagttccttcatataacgagaaacttggcctgtaagatagcataactattagtacacgaattcaccgcggataactagagtgtataccatacctagcctgcgacgaaatagttttccgtgtgcaatctcaaaatcctgcactcccatactcagcatatcacagtgtgcgccgggccatggggttttcacttccccaatgaccttgatggcagagacatcgttgagcatcaccatatctgggacccttgtgtaacccgctgctgcggccgcactggccttgaagtctgccgcccgtaggtggtgatgctgggcttgcagcgaagcggtgaccggccgtccaagccgctcgttcaaacggccttggaggccggtctcgtctccgaggacgagctgttcgacggacattgagttttctgctcccgggccaacaatgcgaacatcaagggtatcggtgctccaattggtgcttggcgaggagagggcggcaatgacttccctttcgaagtttggccatggcatcaactggcccacaaaatcgaccttgtggatggcgctgctgttggtatggttgggccctaccaggaggggcgggagagtctcgaggagaagttctcgggcaactagagtaatgatctgagccattgctttctcaattcgagtgcgttggtcaatagacgtgatgatttgatgagatgaatatgttactttcagtcgtaagtgctttgttcagatgataggatctcacaagctgcgaagtaatcagataagaaggccgagaaaccgatagagaggcaagtaaagaagtctgagagccagattggtgaataagaagtgaagcctaatgagctaatagagagacaagtagagaagctgagattgactgatcgagtagagagaagggaaaggctaagagactgatggagtagacaggtggagaagactaagactagagtaattgttgggattgtttgcacggggtgtattgtagagtaggtagctacatagtgtgctccttgagcttcctctactcccctgtcccagtactcgacagcaaacaagtcgtattgcccactcaccttgcacccctccctcgtagttctggcagtaatgagctaagatgatcaaaaggaacaatgtccaattacatgaagcaatgatcaaatcagactttccagtccgagatatcaccattgaaacttttgttccataggtaagatcgagggggcctagcaagatcaaaacgtggcaaccactctatgccgaaagtgcctttagccttgaaaccctctgcatcccggaaaccaacaaaataactgtagcaatacgttagtcgaactctcaatattataaacatgatgagcggcatacagagcaccggtatccgaattccagactagattccgagggcgggccccttcagggaaataccccatatgctgggccttcctaataatagtgattccatattagcattacccttggcaatagaaaggtgttcgactcacggaagctctcgaaggaaggcctcacggacacgctttcgttcctcacggtccatatcccagtacacaaaagcagatttgaaatctcctaggcgatctccagggaccttctcccatacaatccacgtaagatgccctctaggaactgcccctgacctactatcctgagacccttgcttgtatgctagtagtagaggtgtattttgcgagcatttatctttaagaaacttgtatgcctttagctcggggggtgtgaattcagtcgcttctcgggtgcgagtagctcggtccgcatcctcataacaggtgtgtggaacttgggcgtaaacgcgcataaaagcctcttgtccacctgcagcgttgtggcattcgaacagaacacatgcgtaagagtcgagagaccggtctgcgcattggtagctgtgcttattgaccagtctgtcgattacccattccgagcgggtgggcttgttgagggtgacctcgtcgcctggatcgagcccctcagggaaccatgaacgcgggacgtggtcgtcgtcgtccatgattaattcgataagagataaaagtgcgaaattatgagaaggtcagaaagcagaagaaaggtgagttggaaatgaagaaacttgatgaggaggatgaagagttgaaagtggaaacaaactatggtacttggtcacatgctctatttgcatatactgatgcgcacatacagattggtgtcaaaagcgtcaaccatactacggcaggttttagacgccatcgcgccaacccataataattttagagagttagagaattgattgagatttttctgccatatatatatttgccttactaccgtttttctgttagttataagcccagaatcgctttaaacttgactcttataaattttcacctttttatctgtcaggaccctagtactaagaaggctgatgcctgaggtattgcacctatcagggtgcgtggggaactgtggactaggcaggagccgtgtgtgctgcctgtacagccccctttaatcatatgacctacaatctgtatattatccttatatgctgcttctttagagaagtagctattagtttctaatataccactgcgtatactactgtctctatttcccgatcctccattacatacagcattcccttaggcattccatacctgggggtctcacagtatattagaactaatagctgcttctctaaagaagcagtatatgaggataatatataggttataggtcatataacccatagaggctgtgtaggcagcaatcattactcctgtctagtccacagtcccctacgtacccgggacgggtgcttccacgtaccatgacaggtatcatacttcaggcatcagccttcttagtactaggatcctgacactaagccgagtattctaagggaaataataatctaatgatattctatcgttagttcagctaaaggggttaatatagtagtcgcgcgactcgggtaattattaccccgattttcaccctaactatctatagcgtactcaccctactcacccctagtcgcgcgactgtaaagcagcgcttacccatttcttacccgggcgacacccacccaactattgactgtgtataagccatacgccggtgagttagtagttaggtgggtgactaccagcgaatcctcactgttatatgtttctacttttattttgctctttaaatcttatatagataaccaatgtagagttttagggaagcttttctttaccatacggatgtgttaatccatacagtcatagttcgattgggttccagatagtagcagataccaacaggccattgttcgctacagaaactctgccattgcgtccaggaagatcagattctctaatcggcgaatagcagtttagaagaatgctcaagattagaacaacctcgaaggagcagagcctggccttggcttcccatatcatccaaggaaatcatgctgccaggtcagattgaattttctttcctgttcaatctggaactgacgcaaaagttcgaagtcaatacagtcgtgctcgactccccatccagtaacggaagtagcatgtcctgtaaaagcattagacaagtgtatgacaataatgtatattggagagggttgactctaccttttccaactttgatcggacttgacccttctattatgagatctcccccacacgaaattgcttgcctgaggtattcgaagcagtgcaggacatgtaaattccatttgactgcatcatgttcggtatcgaggtcgacaccgtcccgagcttgccaaaactgaaagcgaaccatattctgtgacttggagttagtcaaattctttaattagattacggacccaaacgtactagacagtgaagttggtgaaggatcgagatcacatagaaatcatgttgtggaggatcggtctcgtggggatgatcgaatggcgcgacgatgccctcgggcaaaccccatttgtcggggtcctcaatccagacagcatcatggcctataattatggagtgtgagtaagcaatgatgaaaaggaagtggtcgtcatctcaccagctaccaagtcatcccaatggtgatctacctctttcgaattcccaatgtacctctcatccggttgaaatacccttctaactggcttaaacacgtcttctggaataggggtaaatgtgccgagcggaaacttgccactgattttcggggcagtatatgacttccaatatagaactgcggtcgtagtccacccagttgcaaggattgagatgacaatgtataggagaagattccaatgcctatgatcttcaggcactggaagtgctgtatcttctccgtcattattgtttatttctcggtacttcgaatcggagcctcttggcttcaaaggccacatgttgtcagtcactgaaataaagccgagatcagagagaaagacaaaagagcggctcaaatgtttagagtcaaataaccacaagagttgcagcactatggtcaaagtgagagataatctttcgtaattgctccgctctcaaattgctacctagaattacatcctatatcctccgctaatcctgcatacctctctaatccagttgcatcaggcctcactgaagtaaggatagaaaataaacatagatagagaaattagagccctaccccgcgggccagatctgcaaatatccacatttgctaatatgaagagcatagaaaatgcacatggacccagctgagtaaccaggatatcagttcagccgatgcaaatacaatgccacctcatcctgcgatatgagtggtccatttgtaattatgtagggggctcgaaatgcagtcacttgcagtgttcgtagatatggccaaaggaggtatagaatgccaatctatgtactttggttaggttgtaatctagctcgttagggatgctacgacatgcatatatgtatgcccaggtggtatgcagaatgcaggtgggttcagctgaaagtgagttcatatatggcccaccttcattgagaaataaacagagccgcgtaattatgatcgtaattaattcactatctagaccagaactcatctttacttatttgttgcttgtttgaatatttaatacgctgtatgtactccgtacagagttatgatatcagcttactgccagtacgtacggtgcaagcgtatgaatcatgaatcataattaactaaaggtagaatattcattatgtactgcaataaataatatattcttgagacgttgagtacagacaaaactattatatgcaatgggatagatttcttgcaaagatattgctacatatacctcggatttcaagccgcgcttgatgaatttcccatcccttgccgccttttggtcgctgagaatcaagcacgcccaagtatcctgagctgcacgaggaagaaacagaaagaggctaccatgcgtccagggtaatatagatgcactaaatgggaccctatggtgtgcttccgttgcagtgtcgatcctgtcatatatacaaaataccgacctgtgtcgtctaggaggcaacctgaacaccaaggcgtggtacgtgagaaatacgaaacaaagacgcgaccccaagcgtaactaagcctttggacccctttaatgtttactgtgggtcgttagcgtgataacgtgatttacaagcgctttagggttgctacggataccgcggcttgggaaatgcaatcggggcaatacgttcaggcaagtgctcccatcctgtcaattgctgaactgtcaattgacttgtagggcaatatgcagttgctagtaacgagcgggacgggaacgaatccacttcagccatttgaaccaagaaaaggaatgctccaagtgacaagctaggcgttcgccccactaaagctagattaatttcaagctgtcctgtagtcgaacgcagaactatctgtacggttcaagcgcatttctggaatataagaaaagacgttgcagccgatcaccaccaaggcagaacggtaccgcaaggaatcggatgaatcacgggcagaggatatagtactaggagtgagttgtagatgtctgatatcttccttacgaaatacgatgctgtattatttacggccttaatttccaccctgataacccggtcttacgagaccctgccattgcaggacgcaaggaactagagaaaagtaccccgaaattgatttttaccgcatttagtacagcagatctcataggaatcttacacattctcaggtaacagacctaaaagagatagggaatttggccgagccaatagacttagctttgctcaatggccatgtccggcatgtggcccctcgtcaaaatcattcaggtcggcaggtgtatgcgtaagtctaccacctgtataccccgacccatgcactttattcgaccgatgctcgtacgcccaagaaaagatcttattgaaatcacggcattgatggacagctcccatgccgttgattcccacttcggacattggctcgaaagtagggtctgcatggcacatgagaacttgtcggatatagtcgaggcaatgatcgcggtggaaggcgacttcttcctcgtccatgtctttcacggatgagggataataggcgaaccggagaaagttctatgcaagaggttagatattatatattgaacctgaattggctccataccagacagtgtagctggtggaagactgatacaccgtagaccaacgcagtctctggattatttggggcaggtagggactcgggaaggttctttgcagctgcaattggaagttccacgataccatcaccagctaataggtgattccgtcagtcgcgattctatttctcaagttggaatgaaaggatgcactcacggggagaaagtcgtttccatatctcgtctgtcttgtttgacggcggtccgccgaaataagagtgaggttggaaagtaacccggctggtatattgcactgtgatacaaagaactcttgatcagccggctcatttctctctacactctttctcaggagaagcttttgctcacagtcttcctcgaacttggttgtccacgagtcatcgcattgacattcctccgacttcctggcaaatgtgcctgtagcccacaggcctacagtggtaatgaatataagagcattgagggcgattagccaatttcgataattgcaaatctgccctccccaggatgaccgggaagattttctagagtagttccaagggtgaggaagtaatgttgagctcgaatcacttccacctgactcaataggaaggtccttgtctgactggaaatcatcatgagcggccattgcagatttgagggggggagataggacttgtcatcaaagttgaaagaatagatggatgggtattggatgaaggatattgatggtttcccaaaatatatatgtaagagaatatgcacgagacatcagaatgaattagacctacctaatcatcctacaagttgtccaatcacttgaaaccttttaatacagcccgtacatgaagtatatcagatttcaggcgctccatggtcttccctttccgttttagtgctcaccccttgccgcttttcgatcaggcccttgattattacgtaatcgataaacccgctgtaattttcaggtccggtatgattaaattaccgccaagagcgataactgaaaaatacagatatcgcgtcctagtggaattttcgtaaggaatgcccgggcgtttcaatctttacatctctcgcctttcgtttttcgcctttagtttgggtgatgtcatatccacgaccaggtggtaataaagtggggtgaaatcgccaaacgcgaatggcgaacatcatgcttacaagccctcgataggaaggaagagctgattgtcttattccgcgcatattctcaagtcaaacggtattccgtggcctcgcgaaacgtaaatgccaaggcgacttgagcacaatcgtaagtccatgctggcctagtcgacgttttagtctctgaaattaatgcggggtttatttcatctctaggctggtgagtcagtccactcgtaccctaattgttggcctttcaagccatttagacgataccatctcgcctttcgccctaaattgtttactgatttgactacccagccaaacttgcaggacaaggcgggtcaaatgttagtcttgcttacgtcgtctccagtcactgcgcgtgggctgattctgatacaacgaaaggcgacggaaaacgacccaaatgtaccccatgtcaccgcattgcgcgcgattgccattggcttcaggaaggaggcacaacagcagcgccggtagttccagtctaccaatcgagccctttgagcgcagctactccccatgaaaccgaatatacctccacggagcatcctgagtatgccttacaggacccacaagttgccaaattatttcgccactacataacaaccttggccgcgtggtatgatctcaatgatagcaagcgccatttcaaggatgttgttcccgtcagggcgagatataatccgctattgctcagtgctattctcgcgtttgctgctgctaatcaacaccgcacccttggcgaagaagcgtatctggatattgctgaattctaccactatgatagtgtgcggagattgatctccctcacgaagaatatcgatagcattcctcttggcgaaacactcgccgccatttgtcttttgcgatcttatgaaattatcacacgttagtagttcccgacattcctaatttaagcttcctctgaaaatacagacgctaacagcttaataacaaccttagaaaacgtcagctctcagagtcacctgcaaggatgctattctctactagcgagtcagcgtatccatctcacagcagacctactcagcgcaggttattggaactacctccgagaagacatcacagtggctctcatagagcaacgcggtttaatgatcactctgtccaatcaaaatgccccagcagaaccaaccgaggatgcggactttgctagttccatcacattcctgctcggcaagattatcaaccggtgcctggcagtcgattcacaagcattagcccccctcgaatgggaagccatgaaatctgaactagacaagtggaaagcatcactcccgtcatatttcgacacgatacaaacccccgggctcgggaaacagagtagcttcccgtctatttggacactgcgaagctggcatagtgagtatactcgacctacttcttattcagcttctaacatggtaagcgtcgactctccattactaccataccgccatgggaattctatggttggctcagcctgcagctcaacccttgaaagctctacaacgcatcgacgatatggaatctatacagcggaagttagaataccacgcgacggagatttgtgccctggccctttcgagcgactccgcacccgtctgggtcaatgcttttggcccgattgcattctgtaagatttgtcaaacgttccctcgggctattctgatgaacgttgtgtatagattgcccttggcttcgcgatacccagaagcgcgtggaaatggcaggagagttggaaaagtgggggaagctgaccgggtggccggtttccattatagcggatgctctttctccgccaagcacaacctcgatgacactttagatctattaattatcacctttgtattctatggaaattctgtgggatggtagtgaaagagcttcataacactttatggtattcttatccacaaagtcaatatggatttcatctcattcttgtttgattgcgcataaagcagtttagatcaagatgaatttcaagactaccacctgtcctgtcgtttcgccatcaattaccagtagaataaacctcgcctaagggttctggttaaagtcgtaggcattgccaaagccgcggttcagatagcgcgacagtgcatccgacttgctgacccagtccacaggaacctccagctcagtctggccctcaataacaggcttgagatcatccgcgaattcaagtctcatagggttgcgataccacggcgcaaagtggactatcgaagttagaaatactcagccggaggacagaacttcaacttactcattgccaacatgactcgggggtcctcggtctggttaccgactccagcatgccaaagacgaaggtctctgacgaccaaagcgccctttggaacgacgggctgacatggcgggcgctctacacggcgcttctctacctcgtcgagcttgatgcgaccactggcacggtcgccgtgttcgccctcttggagatgtagacctgtgtcattgtgtgttcccagccatacctcagtagagccattcgccggggtcatggtgatgagagggacattgatgacgtatgcaaatggatgaattggatgggcaaagtctgcgtctgtgtggataggctgggacattggagggttctctgcagttgggggcattgcagtatttcccgagcaaaaggtccattttgggcgtggtcccagtgctgatgtggtgatttgagttgcgatggggtctgagtaggattaggagctgtggactgaagtgcagttggggctttgtgacatactcatgaaaatactaggctcgaagaattccctcacgggaggagcgtcttgttggatatttcccaggttgtagttaaatgggatgtcctctttcttggactggaggtagtaggcatcttcgaccatctttttgttcagtcggttgaggcagtcgtgggggatcacattttcaacaacgacaagtccatcccggtgcaggctgcgcattgcaatctctagattctggtgtgaaagacgcccattcttgatttcatcttgtgatggacgaatggatttcggataacttgtgatcttcccgagttgggtcgctagagatcggatctgatagtgacggctcaacactgttggagccttgaagaggatttggctcatggtgatgaagtgatatgtactaggagaggggaatgtgaagacaatttcaagagatcatgaattatttatacatgtcaagtcagtttaacgagataaacattgcggagacggcctataaagatgtttgccccgctagtcttttcgcctttcctcgcctttcggtggtgccactttcgctcgtatgtatgcggagagtccgacttgccgagggtaaatcgattatattagcttttaaccatagccgtttcccctactttgccaatcgcaaaaccagttaaatagcctctcaaaatatcgcttcgctaaacggctcgcatttggtggattcgttcgcctttcgtcccattaggcgaaagcgcaggttcccttcaaccccgcacgcagcctgtttctatgactcctaactataaattgtagtaatttcctcttaaagtccagaaaatgacttctcaaccgaagctcctcccgcaattgacctccgccaagctcttcctcaccgaagctggactcgaaaccaccctgatctacaaaaagaacatccacctccccagcttctccgctctccccctcctcaatacagaagaaggcacagaaaccctcctcgccatctacaaagactatataaatatcgcgctcacgcactcaaccggcatcgtcctcgaaacacgaacatggcgcggctctccggcatggtcttccaaactcgacctttccgtcccgcagatcctcaatctgaaccgcgcggcagtgaaaatcctccgtgatctcagacccaagattgagacgccatctactccgatcgttatcagcgggacgctggggactctccgggatgcgtaccaggattccacggatacggtttctttctctcaggcgcaggagaattaccgcgcccaggttcgcattttcgctgaggaaggtgtagacatggtgtcgattatgactgcgacgaatctcaatgaggctactgcggcagttagtgtggcgcgtgagtataacctccctattctcgtctcgtttagtattgagattgatggacggctgcggggagggaggacgcttaaagatgcggtgcaggaagtcgatcgtcgcacggggaactacacgacgtatttcggtgtgaattgtgcacatccgcgtcatatcaggacggcattgcgagatgttcctgaggatgtgaggtcgaggattggggccattcgagggaatgcgagtcttaagagtcatgatgagcttgataactcgctagtgctggatcggggcgatgtttcggtgtgggctgaagagttcaatgggcttttggatatgttgcccgaactgaaagtcgttgggggttgttgtggcacggatgaagagcatattgagactcttgcgagagaaatttacaggtaattcctggttttaccgaatatttacatagctggatgtatagtattagatttatgaatagaattgcaaagaggagaattaaattcgtattccagctcacagcggaagaccatagatatcataataataataaagatcattcagcatacacaacatcattcaagagccacgctcaaagcagatctttgaagtatccacaaacaccaaaaagaaaatcgtaaaaagaacatcaaaatcaggcctcagccttggtctcgacactctcgtggtgcgtagcaatctcagccttcttctcattggcatcgatctcgagctgctcagtgaagttgacggaaggaacccagccaacagacttccaagcacgaggaatcttagcataaagctcatcgacctgctcaagcgaaagacccttagtctcgtagatgcaggtgtacacaaacacagcacagacgaagcagaatccaccccagatgaagaacaccttggactgaagattggcgtttccaggcccgctgttgaccatgtatggcgtggcgtaggcaatagcccagttgagcagccagttggtggcggtggtgatggagagacacttggcacgcgccttgagggggaagagttcaccagtcacgacccacgcaaccgggccccaggaacaggcgaagaagaagatgtagacacacacgaaggcgatgaggactttgttcgagatgtcggagtcggtggctgtgccgacgatcgcgacgatgagttgcgagacgcacattcccacggcaccgaacatgagaagagggcggcgaccccatttctcgaccatatagagaccggggaaggtggagatgacgttgatgatgttggtgatcagggtgatgacgaaggagttttggatgccggagttttggaagaaggtggtaccgtagtagactgtttttggttagtgctggaaaaggtggaatgggtgagaagggaacatacagatgaagttgacaccagtgagctgctgcagaccctgtatggcacagccggttgcgagacgcttgccgatggatccacgaaggatctcgaggtaggtagcacttccgagacgcaattcgtattcgtggtttgcctggatctcggcgagctcagcgacaatggcgggatcattcacgtccatgcggcggagacgaccgagggacttgctggcttcctcgtagcggtcttgcttgatcaggaagcgaggggtttcggggaggatcagcatgccgacgacgaggatgatagcccaggcgaactgcacggcgacggggatgcggtagcagccggtatcatcacggtccttggtggagttgttgacgatggcagcgagaaggagaccaactgtgatggcgagttggtaggtgccgacaattgttccacggatccatttgggtgcggtctcggactggtagagggggattgttgcggagaggagaccgacgccaaaaccggcgaagaagcggccagctacgaagagggggatggaggttgctgcggtttggaggacaactccgaaacagaagacgaagctctccatcaccatacccattcgacgaccaaatctatcagcgacaggggcggcgcctagggcaccgaagaaagtgcctgccgagaggagagagacaatcattgatgattgtgcggcggtaacatcagggaggtgatccgtttcgttgatgaagccagtcgagaacatctctcgccatttcttcatggcgaggataccgctgatggtaccggtgtcatagctagatggtgttagacctgtcttcgagaagtatagaacttgagtggtacatacccaaagagaacaccaccgaatgcaacaaacagtccaatgatgatagccggggcagcagagcccacggcctcagtcggcctcttcaaagcgaagcccattgcgagtgtgatcacgaagaatcaagtcaacccaagtaggtatgtgtcgtgtgagtatatagatgaacccgaaagtatagatgactcagagaagactgatataggagagaaaggaggaagcaaggtacacaaacaaaagaagaaacccggaggtcaatccccctctatttgtacttccccagtctctcaaccacatggccccatgcttctcaagccggggaaattttcaaccaaacctgaaagcagcgcgggggaccgaacttgccttggaaggcgaaaatccgagtcctgtccaatcccagaacagcattccccccattgtcacggacttctcgatgttttgggcctggggatagagtttagaccgaaactggagaagctaacgtggttaggggctcaggccccggacttcaaccgggatggtcattggttcgacgcaaattggctcgtccccgaaccgagtttgatttttcttccctgagccttggcgtgcagttgttgtgctttgtgcagtaggatcggcgaaactacacggagatatagaagtacatggaatcagtatagtcttgctgtacatatctactgcatatggtgctctattgttactgtttgttgtatatcctattatgtatttgcgtggcaacttagggctgacatgtcttaggaatatccgtaaatagcctttccataccacacgacaggccgaaaacagcgggggggccgggttaagccaatgccgatcggtatcggcgtgtctcccgcatcgggggagaggccatgtttatttgtcacattttgctgcaattcctatgtcattttaatttagacatagttctggagcgtgttaaattagattgcaaatgtaatatgtagaaggtcagagatttcaattttcaaagcggatatttttcccccgtcttttcccctcatccccagacatcagtttccccagacctcccccagaccttgtatggagcaggggcccgaggtattgacgcccaataagctaagagttggcagttacgaagctgttcaccggagccagaatgggaagggggcaaagcatggccagattaatttcccccagagcatgaccttcgcgaggatctgcagaagccagaactcgccaaaattgccggggaaattttgaacaaatgcccagctggcttagtcccgcgccagtgcgccattttcccaagacgcggattggacagaggacccgaggctctcccgacgttacactcccggagaatcatcggagacacctgtggcctactactagctagatcggtattggactcggggataactttgccggtcaatgccaatgccggtggtttttagcgaggagtggcgcaggtcgggagctaaagtagcgttagctctaggccgttcgggttttgcctaggtcaatgctaaaaactgatcacatgttcgaaattagactaccgagtatgccaattcggcaggttccgatgaaatgcttgtctattattttgatgctcgctgaagaagaagaaaaaaaaaactggccagactagctaccagcgccagatcaggatgaaatacacagtcatcaccacttgcgccacaaatttgagggaatggtatagatcccggacgatgagagagacagttgagtgggaacgggtagccgaggcggggcgccatgcagccttgtcctttgaggcggctccgaagtccccgtctataccccgatatgcatcttctggggatttagtgccggggtagcgggtggaggctgtcatgccattgcggctggctaaaccacccgccgatgagagtgtagagctagatgcaccggaggtgtggtgatgtgggagagagcgcggttcggaaagggggagaatcgcaccggaagggcatggttctggggtgtagaggacgcggtagatggaacggaggaggaggatggagacactgatacacaggataatgaggtagtagatgaagattcccagctggtctgggaggatacagaggtggttttgcacagtgggtggtgatccgtcttggatggatttgcctgtcttggggtcgattggattccacagactggtaagcacgaaccccgggtggcggactcccatcgcccaggaaatgcttttgacggtgatttcattgggcgagccgttgaattcccgatgggacacttcacagtagtcatggtcgtcgccggaatacacctggacgacattgggtcctgccttggaaaccaattcggtggaaatggtctgcgtgaggacattctggtactgatagcctccggcaattctcaaagagttaggctcgtcctctgtcagttcctcgtccgatgaagacggcgggtagtgttctcggagaggaccacagggagtggctggttcgcggtagagcgggacgtgtgtcagaataatagtaggaaagccgacgcctgctggctgaggcttttggtggatggcgggctcgacagcgtcggcaatacgataatcgaagatagtatgctcctcggtcttgttctgcagcattcgcagctcgtccgtctccgccttggctttgtggatagccatcttatccaggaagtcatctgcatctttccagatcgggcggagagaatggttctcgctggctgttggagagctgcccgtcaatggatcgggctggtccatcgcgctcagcgagggactgtccacggacacgaaagtatgattcccaataacatcgacgcggttggggtttccaaaaaaggactcgaagcgatcacggacgggttcctggataccgttaccgaacccaagatcatggttgccaggtagactagcaatcattctgcgccctcgtccatcgacagggggcttcgcaaatttctcccacgggtccacaaaaattttaataaatcgcccaaactctttcttccaaaaggagtccgtatacttcttccaccgcggttcggggctgctagttgtagccgtggcccattctctgccgccgtcgaaaaggtcgccaagaaacagcactgagtccggctcgaggtgatcttgtatcaaggaaaatgaccgtcgcatatattggtcggtgtatttgaccgtcaacgtggacacaggccatggtcgaccggggtaagtgtggggatcaacgagctgggggtcggcgatgaaggcaatgtggtgaggtgtggcaccttgaggctagacattgatgttagtaccagccagggaactgaattgcgataggtattccgtcaacttacccattcttcccaactgtcccaaaggcatttgttgatgctgtcctcaaataccgtgcgttcgccccaccgaatcgagaacatccacagtaaaataatgacattggaaatcgtaaatatacgtttgacaaggttgatagcagtcggcttaattccctcacttcgaatactgccaattctccggctgacactctccgtaagccattgtcttgctgtcgagggaatgcagtcccacacgcgactgaggatattttgcgatctcgacgactgatgttggttgtaggacggaagggaggaagcgcccgtgctgcgtgggtaggcgaatttcatgtttggcttagcttgacagcaagactaagttaggatagggtggctcgaccccagacgagacggggctgatcttcaaacaaaggaatgactggtcatgctctgggcatacaactgaaaagaaccaaaagaatgaaggatgaaggatcaaaatagtaaaatttcataacatggtgttcaacttgaagacagggggattaactggcaattgttttaagcttcgggtcaatgtgtcgatcgccagacatggggcggtcacgtgtggacccttaacaaacagattgtctacaacatacggggtacaatataatttcggcacatttccaaggctgatttgcaggtcttgaattagagataagtagaagtacataacaaatgcagtccgaaggatacagcgggtcagcgggtctatgtccgcacattggatgatattgcacggcatgttttgccatgcatttcccaaaagactgtgtagctcaagggaactaccacttccaagtaaaaccagacaatgaaatgggaaaggagtaggacaggtctctagattctgcccgaacgaggtgcagataaagatagggtatctgggtaaaaaaaaaaccgtaggggtgagatgtttagggtaccaaatgagaaacgaaagtgcgtggaaagtcaccacatgggattaagttcactttttagggcaacactggcctccttcggcacagttgttgtcacactccagaaggcatgcttgagggtcgccctcccgaacactagcagcacgactgggaatgtggtcctcggtgtgagaggatgatccttgtccattgtcttcgacatcactttccggcgcgaactcaggttggatagtcgaagagtgaataccgtaagcatggagacagcgtctgacctgtctcgccagacgcatgtacctctccgagccttcacccttgatctcggtgtccacttggagatgaatcgaagccacgaccttggtgtcgctgagttgccaaacgtgcaggtggtgtgatccaatgacaccaggaaggcgctcaatgtcttctttgatgtgatcaatgctcatgccggggggcacggcttgaagaaggatacgcgaggcggccttacacaacggaatggcagatgcaagaatgatcactgtgataatgagagaaatgaccgggtcggcgtaaaagcgccacttgtagtccgtcaaccagatgataagcgcggaaacgatcacaccgatgtttccgagggcgtctcccataacatggaggaagacaccacgcatgttgaggtcgtggttgtgacccttcttttggccctttggcttaggctgggcatggttgtgggatttgtggacatcttcatcggggtgatggtggatcttggtaggagctccttcctcgtcggtgtagttggttgtgcgatcgcggtgactcaaaagacctgaacgctcagatggctgctcatcctcgtcatttccattgtccgaatccgacgattgttcattccggtattgactagccgcgataatcccttgtctcagtctctcggggagcacgggaatatcatcggcgctcacgaatccacgtcctgtcgaagtgctgtagctccttggcccgcgggtctggaggtcgcgccgttttcgggatgggtcagtgggagattgggtaagggcattttgaggcaagcttgcggctctgtccaaaaccttaggcgccgccaagctctcactgtgttcggcgatgggtgtgtgatcgtgatcatgatcaccagcctcgatgtcatggtcatggtcgtgctcatcgtgctcgccaccgttgccgtgatcgtggccgccaggtccgtgggagtggtcgtggaacagtgccaatccaacaatattggaggctagaccgaagcagccaacaatgcaaacaaagcgcgggttttgcacttcctggggctcgaacaatcgctgggtcgcctctaagaaaatcgacatgcacagggcgactaggaacacgccattgaccaaggcaccaagtgtctccgctcgttgccactgtatagagaaaccaattgtcagatcgtcatcgtcttcgggctagtattgacatcaacttacgccataggtgtaggtgttggagctcgtctcccggttcgcaaccttcacggcccataatccgacacatagggataagacatcattcaactattcgggttagattcagccaaagagcaagattgtagatggtggcgtaccatgtggaaggagtcggcgacaagggcaagagagtgcacggcataacctaggaaaacacagtcagaagccggtcgcatacggtcaaattgccaaaaactaaccagtgatcaattcaagcaagaaaaatgccgtatcaatgaccagcaggatcaagatcctgttcgttttggacaggcccatggtagcgtgaggtttgtggagcgctcaatcagagctccacgggataaaaagtgtaggtttataactgcagggcacagtgaatatttaaataaaaggaaaggaaagagggaacgacagagaattatagagaggaggggttgacgcgatgaaaaatacgtaaaagcgccggggatgaatcgaggccgtaaacggccagggcggaaacacctccggcctccggtctggtccgtggtggcgagactctttcaactttgcacttttattagtcggtcaatttcgcatcaacatgtctcagaagaagcgatgctttgattgagagtctttcgcttatttcgcatattcacagcttgaccccaaagagccccggggtccacctcccgtttacctgatcggcgggggactctctcattggaccggagcctcattattttcattgttgtggcttcccatctaatcctgagtcaagctcttctatcctctacctggtgactagctacatgtatacaccgttgccttacagacagtggatctatgtcctttgagctctgtgaacggacccattggaatagctgcattaggatatcggtatggtagcaccacactggaagttataaaagcaactggctcatgtgggactgatcactgcagctgcattgcacacgttatgggtatgctttgattcctcttctttcagcctatttacggagtatacggctaggtacgcagttcctaatgtacttatctgtactccttactcactgctaagcttttaggaaactctcacatcgggagctcgcataatttcaaagccctaactcatggtttccactattgcctagaactttcagcgctcttctatcggtggacacgtccggtacagcgtttgtttttttctttttttttgcaatatgaaacttagattagtgggggcccatgaagcagattttcaagactacgtagtacatattcacacgtcaggtataatttttaagtggcaggatagactgtgtttggttcacgctatatctacagacttatcatgctaggagatagtatcacaggagcaaaggagcagtagagtagaagcacaaatgtatactgacatgtgatggcgcttatcttcctagtgtttattacctctgtcgccaaactagtcatagaagctactcgacgctattagcaaactatgtggaaaccagcttcattacatgaattagaacgccaatcataacagtattctatatagaaaatcaaactacttgtaagttgctcctgctctgtactttgtactcagtacacattccactttcaatacgacgctggtccatctgtgtagcttgtctaggagaaagctccgcgccaattggtgcactatgttaggccaatgggattgtaaagcaataataaatggcatcgggtggtttgtatattgggttagtccgtaacggatacttaatctgcgggatgataggatatataatcgctgctagttattgtcacgtcagagcatatgtataaaatggtgaaattgatgtcagctagggaaaaataaacagcctatatttatgctagagtagttttgtatattcaaaagtaaagatagtccaattgcaacaataaatgttcctaatgagccctaatgagattgaatgtcaacattgaaagtgggtctgtcggtcctatctagctatccgcgatcgagcctactcggcataagtcccacaacagtaggccggctggcccaatggcaaggcgcttgacttcgaatcaagagattgcaggttcgacccctgcgtcggtcacttcttttttgtctttttggccctgagtggtggatggttgtgtatagtttttgtggaggcggtgatataagcggtaaggatatagcgataagagacaaaggaccgataactaggcattatacgcaggtcaaatgatatcaaaatgtactctgcactacatatatcaatgggaaaggagctgttctctaaggaccattataatggatattttatcagctcaagcggcaagtaagcctgcgatagtggagtatgatttttagttcgacgataaaccaggagaagttaggcagttaatttacatgagccacatgaatagagctagctatgcaagctgtagatcggagtgggaataaagttcttggtccctgacattgacaccatatgcaggttttagatggtgatcggcattcaaagccctacgcatggctggggcagtgcttacaattggaccattctcgacgctatttaaagacttcattgcgagaatacgaaacatatgacagaaatgtttttttatttacaatacaaccagatctatctaataacacacaaactctcacttatctaaaacttaataagcttcttgcgaagtgacgcaattctgttggttgcattagagaatgcacgcttgtccaacgaaccatccttcaaagcagcagccagagcatcgtaaatagcctctccctgagtgacattcctcccactggcaagcaagagatccataccagcctgagcagccaacaatccacggggaccctggtcgccaaatgccaccagcgatcccgcctcaatagcatcggtgatagtgacacccttgaagccaagtctaccgcgcagctcattctggataatggccttgctcagtccggaggggtaattggcgtccaaagcagggtagatagcccacgaggccatgaccatgtcgacaccggccgcgatcgccttcgtatacggggccatatccaccgagcggagctcctccttggtgaagtcaatggtgacgggctccacatcggtattctcggtcgtgcttgctccacccaggccggggaagtgcttgacggttgcgacaacaccgtcaccctgctgggcgtggatgaatgcagatccgcatgtcccaacgacgctggatgagttgctgaaggagcgctggtagttatcggcgaagtccccggccacgcggaacacatccaggacgggggccaggttggcgttgttatggaattccttgagggtggtcgcggcatcaatgcccatctgcgtcgcggccgctttgtaatcggcggcttcaccgactactttggcactcgacactggcccgccggacaaccgacgcacctctccgccttcctggtccgtcatgacgagcaaaggactgccggaatagtacgggctttgtttgtaggtctgctggagattgtcaattgtggtggtgaggttatcgctgacattctcgccgaagaggatgataccgccgactttgccttccttgatcagctcgaggagctgggcggagggctcaaggccggggtaagagtagatgacatgggatccaatttgcgcttggagatccgtcggggaagcagccaaagctgaaggcgcaagggcaaggaagaaaggaagaagagattgtgtgaacttcattttgattgtaggctggttaaactgtcaaaccgggtatcccttcattgtctatatatcatgtctcgctgtttatgaacacattgggaactccgattttgtcctatgattgccatgatagtccgaactgtccctgaatctgttgggaaattgcgaggggtgttacattgattagattgatcagcgtggactattaccacaaggggaaaccccgcatatgaaggttactatctgggagccgagatggccacgttttggcgttttggcatgattgcaacggtcctcggcacctaaggaatttatattgctttttatgtaacctggttcatcaaagatagttttgggactaggagagatatatttattggggaaaggaggccaaactgcaatcctaaccgagggttcgttgcctgaggtatccactctaacggataggcgtgataaggttccctagtttgcgattttgtgaagaacatgctgcgtacctgattgtaaccatagattgaattatggagtaagtcaaattaatctctcggccgaaattgaaaacaatggaatttgtcataggtggtgggcagtagcatttaagtagcgactatttccatctcaaagcacaattctcaaatgcggtttctttacggttttgaataagagttccctaggcgtgccaagaatctaactgcacgtgggaaatcttatttccataaataagcacttttcccctgggggcttcgaaggttatcaaggactggtacgggtacgaatagccgccatacatctcggaattaggtatatggcacttgccactgactaaatatgtttgatacccacgatcactaccgaatttgagataagcgaaggacataaaacaatattcgggatacatatcacaatagcaagcgccttgaggtccccatcactgacaaccgggcccaagttgtcttggaagaaagttatattaatttaatgttttgtaagtaggtttcagcagatcgaagtcaatattggatgcttggattggtttgacagaggatgaaagatattcactgttgatggagttggatggaacagtcgagtgagtggggtccaaggtggactgacgaggactgtgattgaaagtgcctattgacctgacagaaggaggggcaagaagactcaagtcctgagagtgtccttgtacaatggaatccaagaagcgacccaatttcgtaacctaacagacaaaactagaccacagtgtatcctttatcaagaatatgatcagccccgataacagaatagtgacctaaatagccctgacgtgtggacataacgaaggaacccccaaaactctatcgttcttaccccagatagccgagccgcatactccatcgccgatctcgcaggcatagtccgtcagtgaccaagatagagccaatggcaacgaatccagacctgtttaggctcatgcagatcgtccgagggtagtcgtgaccctgacatagagccatagtatgaactgttaaggaccagtcttcgcctatcctgtctcgcccgcccgaataaagtcaccgagtgtgtggtcaaccatgtactgcgtatcgtcaataacagccggagtaacttgctttagatgctgagccgatcggatgggtctctccatttctgactcaaagaggtaaaagcagttgcatcctgtgatcaacttgggaactgccggcagaacttcgacattttctggttctgtttccaacacgatgataaaatctccccaggattagacttccgtgataggtgtcaagtcgaaaatcaaacccactgctggttcatcgtcccaaatgttaatttctatcaattcgtgaacgactgaagtggtatatagggatcataggctctgtcgtggggatcgtccgtcaagtagcagggtacatgtgcactttgtcgagaccatggcttcggcggcagtttatgaaaacgataaattaatactcgcttgttgcactcaattgcccgtgcttttggaaatagttcgagaagaatttggtagctgcaggttcaaagaatttcttgggatattcccgaagatcaaacgtcgccattaccatctgccgagcgggtcgggtcgtaagggaagttggatttcgaaaccatcttgtgggggacttgtgtcaggaaggcctctctcgccttgggaggggtgatccttggactgtggctgccctgcataattgagggtggatctcccgcccattgctcctggttagtgaggtgggggaaggtgatcaagtccttcggtggattctggtgatggtatcatctttcatctcttgtttagaagctatggggtagctaactagttcagctgaccacatggtgatcacataactaccggatggtgacattaaatcacgtgcttcttctttatcttagactcggaacattattcacactgcatatgatatatcactttcggaactacagtgtacatatagtgcagaatcagttttttccatggcgtgaaacaaaaacgtggtacgtagctcggagcaacattggaggccacatggcagctgccgggtaatatctcaatggctcagtttctttgaaattctaggatctttggctgctagctactattctctaaacccagttggattatatgtcgtaatgaaccaattctacacgaagctcaagctgtaaggcccctgagatgctcaacgtggccgattatcagccccactcaccacttcccaaagaggaagctcaaagtagaagtcttggcgcggagattaagcactctaaccgacaaatcatcttgcttccctcgtgctaaaaattctagtggtattctagaaatgggtaacattgatcagatatgttgtacgcgattctgccaagcagctgaacccttaccacaactatcaaaattccaagtaccaaagtgcctaaagaggtatttctgtagtaatagtctccaaagaggggttctcgtatagctatagcgcgaggaacctttataggctgttcgaagacccttcgtgctatagcactacgataacgtcaattttagaagttgaattaggactatattaacaatttttaccggatatcgaggtaagaaacaaagattggccgttatgcaaataaccccctaacgaatggtagaattaccactaagaatttccattacggcgttgtaccccacaccccaatgacctcgggttgggttgcttggcaagagtcgcgtagactatttactgggtctattagtctgcacggagtacctggagggcgtcattgcttaaaaatttcaccacttggagacttggagggcgtcattgcttagaaatggccattgattcaccacctgggcatgggctataaagactttgcaacaccacgcatacaatgctgcactgccttataattcaacaccaagaaaagacatccgcatctgataaagaatcatgggcgcgccagaactttctagcccgactgatgaggctatacagcatgatccggagcaggccaggataaatcaagagaacgtcgatttggaaagattgggaagagagcgcccaaaatgctttggtggcgcttggtccgaaatctctttttgtctctcgatttttatgtcccaaattcttgcagtcagtcacgacgatgctcctggacaatgaggaaaaattctgacatttaccaggaatactacatctcaggctcaaatgtcctccttccaacgctcgtcagagagctggatctccctaaagcttcggcggtatggccgtctaccgcactgtcgctggtcgtgacctcgacgctccttatatttggcagactaaccgacatgttcggcggatatatcatctacagcgggggagctatctggctcacgatatcctctatcctatgtggtgtctcccaaacatggctgatgttgattatctgtcgagcgttgcagggctttgctctggccgcctttcttccatcgggaatgatgatcctcggcagcacgtacagacctggacccagaaaaaacatcgtttttagtatctatggcgcatgtgcggcgctgggcttctttgtggggattttcttctccggactcactggtgaatatctcacgtggagatggtacttcttcttcggagcaattctctccgccatcacatcagctctgtcactcttctccattccgcgcgattattccgagatgaggaaattgggcatccagatggattgggctggtgcgtgtctttccatcccggcggctgtgttcattgtttttgccattgcggacagttcatatgcgccgcaagggtggagaacgccatatatccctctgttcctcgctcttggacttattttcctcggaatgatggtctatgtggagggatgggtggtgaagaaccctttgctccccggtgatatttttcgagttaagtatatgctgcctctggtcgtcgctctgctatttctttatggcacattgggaatattcctactctatgccgttctgtagtaagttatatcctaatatcgttcagactgggcttttctgacaacagctatagcatgtctgatataatgggtgcttcgccaatgcaaatcgtggcatgggctgcgcctatgggaattggtggcctcatcctctcagttggaggaggaatgatcttccacaaagtcccaggaacgatattgatgctgatatcatgtctcggctacgtgggttctggattgttttttgccgttattcctcttggcggaaattactgggctttcgttttcccgtcgatgatatgcggcacagtcggcattgatatcagcttcaacatcgccaatgtatttatcacgacaaaccttccaaaatcaaggcaaggcttagctggtgcattgatcaactgcactctgcacatggggatcgctgtgctgcttggtttcgctgacattgttcagacccagacgtctgacctgggttctcggcgcagctacaaggctgtcttttggtatcaaaccggactagcgatactgggtcttcttatcgtcgcctttttcgtgcgaattcgagaggctaagagtgagtttacgcttgatgaaagagaagcaatggcagcagagggaaatgaaagagctggcgaggtcggggatgtttgataccctatgcatttgtattttttaaaaataatattagccctctatagaacaagacaagaccctcgtctgtgaaaatttcaaaacttcaatatcgagcacagtcgacatcgccattctatttatatagcagtgtatgggatctccgattggttaaccgaactacaatcacatgttcctgaaagctcacgtgacataactctgtagccttggcgtgcatggtgcatggccctggcagcaatccgtggtgacacttgatgatctttgagacctctagtctccgtgctctactcgccattcccggagcctagaaatatagatcacaatgcgcccttttgattccggatgacgagtgagattcatgacaatgtcagtcacaacaattccacttgaacctttcatatcgaccgcacgtgcggaaacgagtcacgccgacgcagtcatgcgagacctccaatccgaccgaataaaaccggagaagaaagagaacgtgggattgatggtcggcaatagtatagctgcgtcggccatggatttcactgggacatcatcgtttagggaaaaaaaacgttcgtccggccttaatttcctgactgcagaacacccgcttttcccacccatgccctcgtatgggccaccatccgcattgcgcagggtccaatactatgcgttcatcgttgcttcattctttctgtcgatatgcttcttgacggtcatattcatcggggccctgatccacacagccggagtcgcaatttcggaagctcgtctgcgattgagcggccataacccggagaccatgaggtcgttctatacagaggaacaggcgcgcaggaaggcacgggcaaacgtcgataggagatgggctctgcgccaacagaagagggacatggacgaggaacagggacccgaagaatgccaagaatgcccgtcgttggaaggaggcaaggaccctctggttggcgatgtcgcatactatgcccgccgagttggtcttgatgtggagacatttcgtgtgcagacagaggatggtttcatcatcactctgtggcatgtgtacaatccccgggagtatgaggcattatcaccagaagagcggcgtgagcgtggtcccgatgttttcaccaagccaagattgtcgagcacatctcgtccacaatctaaccgtcggtatcctgttctcctgatacatggattgctgcagaacgctggcgcattctgtaccaatgacgaggatagtctggcattttacctctgcaagtccgggtacgatgtttggttagggaataaccgctgtggatcgcacccagagcacaccactttgtcgaccgacgacccgcgtatgtggtcatgggacattcggcatctcgggacactggatctcgcagcactcacgtcgcgtgtgctctacgagactgggttcgagaagctaggtctagtgtgccactcccaaggaaccacgcagaccttcgttgctctagccaaggagcatcgtcctgagctgggtgaatacatctcggttttctgcgcgcttgcacccgctgcatatgcaggcccgcttgtaagcagaccgtatttccgattcatgagtcttctctctccggcgatgttccgaattgtcttcggaattcactctttcattccttccatgatgaccgctcggcgcctgctcccgcctaggatatatggaaccctagcatactgggtgttctcctttttgtttgactggtcagacacgcgctgggagcgtgatcttcgccatcgaatgttccaattcgctcctgtgtatgttagcgccgagatgatgcgctggtggctgggaagcgacagctttgcgaaacataaatgcattttgtccacagataacgaactccttcaggagccaaacgtgaacccgcatacgcgagatgctgtttctgagcatggtgatgatcccagagacgcatgtttgggcccggcctcaagcccctggtatggcccgaggacacccccgtttgctttctggatcggaggctctgatgctcttgttgatggtcgccggcttctgaatcgctttcaaagtggctgcgagcctcatgtgagtctcgttcattcaaagatcattgaagaatatgaacatctcgatgtcctttgggcgatggatgcgatcgatcaggttggcagggaggtcaacaaggtcatttggacaaccatgcctgatgacgcacgtcagatatgtcgcactccgcgtggtttaaccctagacatggtagacagaggttagcttatatttgtttaggcattcatatattctacttcataaagagggctttcagctcaacaacacttcttgtttattcctatgggacactattactgggaaaacatattttacagagaaggactttcttagtatgaatgcgaatatgaagaatgcgcttattgcgttcatttattcctttttgaggcctgattcaacttggcagacccaggtcttcaggcaccgttcaaagatcacctcgatcgggtcgcaattcaagatatcaggcgcatcctggagagcacggcgcagattcgcccgcccgtattcagccatgttctcatagacctcccaccgagtcttatcacccaagacggcctccttcaacattggggtaagcggatgcagggggtcgtccgggcggcgagacagcgatttgacccaatcggtgtaggagaccccacgcagcggataccgcgaaatccgtttgaggatctcgaaactagtgttaatgtcgatcgcgtttgtcagatcgggctgaatgagattataggcatggccgaagttgttgtgcgaggtggaaatgtggagtatggcgttgacgatgaagtctacaggaatgaactccttgcgctggttaggcagaatagggaataatcccagagatatacagctagtgaacagacgagaaacaaaatcgtccgggttgcagaggcctgatttgctgtgaccgagaacgaagcccggccgatagatggacacagggaagccgttgtcgatggcactccaaacgatcatttcagccacatactgactctgggaatagccggtatcatactgcatagcggccaaatgtggtgccgggcgctcgtcctccggcaacatagtggccccagtcacatagcccgtcggcccgtacgcggcgatactggaggaatagtgcatggccttgagacgctgatgcttggcgaattctagcatgaacagtgtccctatgacgtttacctggcggtgacttgaatacggagccacgtaactgaccttggctcccaggtggaagacaacactcgcccaggatgcccagtggtcgtattgggtcgtgtcaagcccgagtttagcaagagagaaatcaccagggactgcaatgacctttcggaggtccagaaacagcccgtactttcgccccgtctcctgaatacggcgcagggcagttgtctcgtcctgcgcccgcaccaggcacgcaacttgcacaacctctggccgcttcaccagagcgtctaacagaaatattccgatgaacccggtagctcccgtaaggaagacccggccctcatcggggctctgccaatggggtattgtagtgtcttgtggcctcaggaactggcccagctgggcatcttgcagccatatttcctgctcggactgggccgacagatcgtccccattcaattgcagccgcgtcaccagttggactaactgctcgaatgtcgagttctcatacaacatgcgagcctgcatcgaaaccccgagcgcttggttgatgcgggtgatcatcatgacagccacgatggaactgcctccaagggctacaaaatcggcggtgggtaccagatgctccgccggtaagctgcagacatctagccaaatgcgctccacctggacagctacatcatccgaatcaatctcgagggctgcggcaaaatcccgcgagcgctcaatctgctcgtaccactggcgctccagtgctctgcgatccgccttgccggtcgagctcaagggcaggtcgctgattagttggatgcgcggcaccatcagatgaggaaattggctgatgtaggctcggaggatcgctccttctgtggactcatgtgtggtaggaatgcagaaagccagcagaaactggcctctttcgacttcatccggggtgatcttgattactactgccgcactaaccagccgggtctctagtaggctcgcctcgagggcctcgagctcgacccgttggccgcggatcttgacttgattgtcttttcgaccgaggtagaagtgcactccattctcatcagtccgcataaggtctcctgtcctgtacacatggccaatacctcgagtggtctgactcttgagttgaggcattgtcacgaaggactgggcagtcttctcggggttgccaatgtagccacgagctacaccaggcccgcctaccagcagttcgcccacttctcccggctgagccaaatgtcccttctcattaactaggaaggtctccaagtttccgatcggcttaccgaccggaatttcgccacgcagagcttcgttctgactaataacatgccaaagagtgtagatgctgcattccgtgggaccgtagccgttaatgatgcgtcttggggccccgttatcgaagattaaccgtattatatcgcaattaatcgcctctccgccggtaagaagtgtatctagtgtggaaaaggcatccgaacaggcgaatgcagtgactgtgaggagagaagtggtgagctgtagcacattgagcttctcagtcttcacgaaggctcgcagagccatcgggtcaagcaccgtctctgccgggatgaccaccacggtggctccacggaggagagtggtccaaatctcgaccagagcgctgtcaaaatggacgctcgcgccatggccaacccgttgaccgtgacgaacgaaatcgctcgaatcaaagctgagattgatcagcccttccgccattgagtccacggccttgggcttgcctgtcgtgcccgaggtatgcagtatgtgagaagaagtccaagcactgcgaaagacgggatggaagctatccacagccatcagagggaccttgctatgatcgactagggtgtggcgaaaagttggcaatcggtgctggtgcgttgcattggtgaggaccagggccgatttcaggttctcgagcatgctggccaaatgactgtcgggaagtttctcatcgagaggaacacaaactcgaccggcatatatgacggcaacttgacccaggacgtgattgagcccccgagggatgataatgcctaccggcgatgtatctcctggattgcccgcctgaatctggattgccagtgcgagggccttttgatgtaactcggcataggagagccgatccgtggaatcctggatggcggttaccgctccatttttgcggatttgttgctgcaagagaccagccagacccataccctccgggctagtcctgccaccacaatgttggataggaaagactggcgtggtatattcggatacgctacttccatgagccagagctccgggtcgaataatgtcaatgcttttatcgtacatggtgataagtgtagctgtgaaaaaggatgtggtatgaagtagagatatttgttataggtatgtcctatgaggatatggacaatagcagtatattgatagctcctgtaatgctccatcatgcctctcctatttatacttgctcagaccactacttctggaatgtcgtgctttatttttatacggaactgtaattcctagagacgtatgaggcttttacttcggactgacagagtgacatctgtcttatccaattgaagctccgacaagaaccggattttatatccctattgcattctatacgcccgggccaggacttcgcatacgcgggctatgctttggactgttgtgctacctacacactgctgatctccccaaaccccatctgcatctccaaatatgacgtcgtaattttgcctcttgtctatatcaataatcaataatggctgtctcttctcgaccctgtgatgcgtagagggtggcgcttcgagaccaccagcacggatcctcagggatgatagacaagctccaataagtccaagcctatcatgctgaagcatcaacgtggctgagcatcccggagataaccctgggagggtccgcagcagtagcagtgacatgagttcgatcccagagtcgcacgaatcccaggggcaagtattatccacgaagtatgatcctaatcaggccgacctgatgactagacctagatctcaatatctctgtacatgcagacttggacatgcctcctggcacagtacgcttagtggaagaagccggcatccaggttccggccggaggaggtcccgacgaagaaaatgagaaatgcctgcacagatcccatttaggaagggctgatggtaaaactccgagttcggagtggttgtaagtttgggggtcccctcgcgaaacttcgagctcgaaacaatcaatgactttccttggccgatcacttgcatatgatccgggagatcatggccccggacgtctctaggattgcgcgatctgacatcttcatccagtagaatcacagattgcgagattttgatattggcttcctcccgtatactcactgtatttcttccgatcccaagcggcgactgatcgtctccctgggcgagggctgcgggatttccaaggctgtagacccgtgggaacaagtacttttgtaaaatccatgaccaatcaagaatttttggtccttgagctgatgtcccctgagccattttttccctttcggaacattttgcctgtgttcagctgcattgcattatggtaatggggcacgcatgacagatcaatatgacatcaaatatagttgcttcaggctcggttcgataagcattgaaaccaatattaaaggacgattgattgctaagcggtttgtatgaaaggttgagatactttcttaggggtgctgggatctgagaccttgtagagggcacaggaaatttgacgtactgggctcagtctctcgtttggttttttgttgagtcaagtttgtgaccgcccttacccttgccctaatacctattttggtcaggtacaggtacatgtcaggtgatgtatacttgcatgaggctttcctgttaccaaggatcgggcgatgaagtatccgttcttcaattgctatccttgcggatggcagcaaaagctatcaatctttctctactgacattgagaggtgagatcagcccagcgcaactgtcccgtcgaaagctgaaggacttcagtccaagtcaatctaagctcagccaggcccactaaccccgcaatcccccggatttgggtgggaccgggccaaatcctccggactccacaacattccacttccatcggattatcataacacatatatgcacatggcaataatgaaagcagatataaggctatagatactatattcccatttagtatcatatctatgttgcattccaggggaacccgcctatagcaggatgatcatctcacccgaacagccccctatttgtctgtgtgtcacaatatacacagctgtgagtagttgagggtacacaggtacttacattgccctggtatacatgtatccgtagtacttttggtcaagccgtgatgccaaacctgaccaatcccatatagtcaaggccaatcaagaccgcttcgacacaacagggctaatgtggtggagagggctaatgcggccccattatgatcgactgggacttcccactatcaattgctagagtgttttcagtattcctatgtgtcgagtctcttcaatattcacagatatgtaattcgaggtagatatcatgaccatgacatccacttaaaccacagggagacaaatgtatcctgaaacatttgacgactccaaggttatgtgacgcatcgcgaccattggcttgccaccgtacagggatgtcctagatgtcacttttcactcagtcctaagtcctgattgactcccaaccccgcattcagtcagatgatgacagtgtatataatctctttcatgtcgctcgcactgcttgtgtactttctcttcttctcaagaaactctcctctccatcacacttacagcaacaacttgacctttccatcaacactctatcctacacactacatccaagatgtcggcagccatgggtcctattatgcagcagctgcaggctctccctgcccgctcgaggcagggtctgaataacctacgccagcgtatcttccagcagggtatgtccttaccccttgtcttccgaccgtctcattaaccttactcctgatattcggatactaacactgttcaaaggagagagacaacccagagaagccaacctcctgcgcacctccctcaatgttcaccgtcccgtttggatcactgctggcggcggtctgtacaccagcatggcagcggtctacctcacgatgcgatatctgaagcgtgttgctaggtagatggaccagtccagttatctgcctgttcgagtcacttatactcgactgcatgattctacaactcccacacatgttttccactactcttcacatacataccccttttattcctcacccccatgtatctattgacaaccaccgtgtctgctcattagatggggggattcttcaggtcccaggttgggctattctttcttttattcggtcggccgttggtatcctcgtcacaggatggcaagatagacctggcatttctgtttcaagggctactttaccctaaatcaatactattacgatgaacatattataagtaaactaggcctgcctagccccagccacggagcgatatgcgcctttgaattatgagtgtgtaaatcgagcgaaatccatatatttttctagcaaggtacacacatcgaaagtcgctatatgaatacccaaaagtaaacctccccctaaaatccgaggttctgtgccagtacaagtaagcaagtcaaagtatgtcgcaaaacccgagaagtgacagatccactcggctgaagaatccccagcttttgagatgctccacttcaccatcaaaggaaccaggagtgcgctcggcccatcgcttccaccatacacgaatgagacctcaggcagacactttgtaaatagcctactggcctatcatacctcctctcttactcagagcatcctcacttcgctgggatgagctcattgcggatgggtgcatgcgttattttttgcctaggggcttggcgaccccgcgtttgtgtgaattgggtgggttgacagggcaaaatgagtgtatgctcatattttcaggtagagcggatggctatctgcaagtataaatccatttttgggaaggttatgtgataaagagcttcgcgaaaggattgtctggagcgttgtgtttctggtcttcttgaacttgatgttgtttcttccgttggaaaaagggtgagacacgattggatcacttattctctaagtaaaattagtcatccgagcactgggtctcatcaaatggctcctaatcgttcctagtccacgtagatgtgtatcacttgcttgatctgctaagagaacatgaacatgtcattctctgactctaagtgctctggggagaagcagccatgatttgaatcaaatatgtttcttttcatatgtctcaaagatcaagcatgtatatacacccccgccggagtcccgccggaattgccaagctttctttcaacctctagtgggaaccttaaatgtcggactaatgtactgtcttcctttatccaaaatgcaaactcaacattatgcacacctccttaagagctatgcggtatgtcttcgcggaggttctgctcaaagcactcgtcccctgcagtcctgtcttcaggtacgttcttcccggtccggtgtcgaatgaatttaaaatgtctccgcgcaggtgtaccgaggcaatatgatggaatttacggcgtcttgtatcatgtctatgctaacacaagcacatacgaccatagggtgtggaaaacagggcttcccgtccgctcagccgtacttaagccacacgccggtgagttagtagttgggtgggtgaccaccagcgaatcctcactgttgtatgtttttgtctttttgcttatcatctattgtaataatgggtagatgttggggttttactggattggctatgtatccattttggcaagtaaagttgcaggtggagggaaggttctttttgggtatacatcccagggatatcaggaaaaggaatcgatatgtgtaaattaaataattaaatgaaaatagaaaatagagggccttgagaaaataagattgaagggggttcctttcttatcagtctttccttgcaacggcagcggcaacaaccaatggggtggcctctagctggagcaactcgatcagctttctgtccatgtcatatctttcagagatcggtggcaatatatctttttgtgttgacgctgagttcggggagttagggtctgactgccgagaggatcccgaggatcggaaccacattccgggctcctccaattcggagattctagtggggatagccctaggctgcccgagaccgcggagttagggagaaatgctatactgtgcttccttgcgtcctatgacaagttggctcgagtttataaatgtagagaacgccaatgccgcagagtgacagattatggtaatgtatttgcaagtatgtgagaggtaggaaatccaattgttctgatgccattggtaacatagcaaaagagcacatcttcgtatgtaaatccgttcatgtaactaagtgaccttcatgattggtagctgagggtaaccgtacccgggaagaccaatcccccagtcgagcccctcggctttctaattgagagcattgaggatctctacaacagtacagcgatcacttactatctgtttaccagtgcggagatcatagtatcaatgtcgtcttctggggcaccaacagccaaaagacaaagggtgaatttggcctgtaggtcatgtcgacaaaggaagtcacgggtgagtattccgctaatcctacactcgctcaacttcttccgcatatattacattctacatgccaataaaaattgggatcaaatcatgaactaaccattttccccccgcaaagtgtagtggcgaccggccctgtatcttatgccaagagctaggtttcgagtgtgtttttcccgaaggtggtacaccaaacaacttgactgtcgggaaaaggtatctatctgtttgttgtattgttctttgcaaatttttttttatattcaatacattcccggtagtgtaaactccaaaagatcctaacaacgtctgcagctatatcttacagctcgaaacccgacttgaagtcatcgaaaagtccctccaacaattacaaaaaactcaaacacccagcatacaacctcctagagactgtcatatccccatgagcgacacgtgtgtgactgacaatttacaccctacacaaagactgcagtctgacgccgacacacttgaaccttccggtcagacttcggctgagtttggggatattgacaattcccaaaattcgatagatggaatgggcgcgatcaaattcacagatgaaaaagattgtgggttctttggtatgcgcctcgctacatcacaattcgagtgtgaaactgaaatcttcagggccttcgtctaatatctcttttttgcaatacatttcccaagcggtggcaacagtaaattctcagggcagatccatctttgctacatctccattagaacaaaggcgacggggcatagtgaatgtttctaagcctgtgttttgtcctgccggttctactgacttgaaattaaccacctttattccaggacgagtggacatgtatgcattgccatcggaggaacgcacttgggatttgatccagcaatttttccagaaaacggggcagcttctgccattcatccacgaaagctcattctgtgagacatatcgtcagatgaagagagaaaattccaaaggggttcgcaggacctggctcggcttgctcaacatcatactcgctatctcaacgagtttgtcggcgaaggataatatcccggcggaaatccgcatacaacaatccgacatctactaccaaagggccaatagcctttgcgaccgagaatctagacgcaatgcaagcctggagatgggtacgtggaaatcccaaaatcgcacgtttaacagccaacctggatgttctaacatttagtcataaagtgcaatacctgcttattctaggccagtatctccaaggaactcagaaatctgttcaagcatggacgacacatggtttggccatctctgttgcgtaccagctcgggttgcactcgccacatgcaaaccaaggattctcttctttggagtgtgagattcgcaaacgaacttggtttggttgtatacttcttgatcggtgagaaactactctatagtaatggtggatgtaaattaaccgcgagcttcttagttcccttagtatgacttttggacgtccttgcactattccggagtcatacgtcaaattgaaaatgccttctgctgacatgcagatactgacttcgaccaccgaggcgagaaattcctctcagttggacggtcttttcttcacagctgccatgtaggccacgtcaccctttctatcagtgttgtgtttactgatgttcgagaagacagttatacagcattatgttcagcgtcttggattcttgttatggccagaaccttgggtttgaggctcctttcaacgctgccgagtcaacctcgtgtctcctgaaatgccaacttcagttgaacagctggcgtcttcaattgctgccatcattaggattccaagtttgggacggtccgatggaagcggatgacgtggagaagatgggggaagactctatactgaaacaccgattcaacatcgttctctctatgcgctacaacaacctcaaaatactgcttcatcgtcgccgtctagaaagttttatggaaacctccccagctgctgaacctataacaagtcaggacatgaaactacttggccagatggatctcggcagtgttgaaagctgcattcagtccgccatatcgatcatttctacagtacatagcatcttgacctccaacgcctggcggcgcgagcttctgggcgcatggaactattccctctattacagtaagtcaccatcttgcctctgacttaggttgccctctttggcacaagtctcattctcacacggttttcatggggatttgtagcatttaatgcggcactggtcatttttgggtcacttattgtggctctcaaaaagcgcgaatatgatatgacaccatggaatgttgttggccattctcgaccttataccgatcgagcgattgatgcgctccgccgacttgattctggcaaccgcgttgtcggaagttgtgtggaatacctttcccatctttcgttggtccttagtgctctgggtaagttgaaactctgcatacctagctacgcactcactcttgccctgacaacctgacttatttttcttttttcttttttcttttttgattttacttctgttcagttggctacgtgttctgtttgcgttggagaatcataatgctgaccgattgcacctccatagaaatggacgattcggattccaacacctgctggaattcaaatttttctgctggattttcagccgatgttttcagctcgcaatatggagcgacgtcggcttccatggatttgggtgaatttatgacaggtcaggattgggggttcctcagtactctctttaaccagtcgcacaacgacactaccagtgcccctcaatagagaaattccatatgtatcagatttgtattatgtttattcctatgctggaagctgaattagccatggtagcaccccggaagtctatcctatatgcccctctggctcttcaccgaggcttttgcaactctctatagatcagatcattcaagtatgtacgtactactggccggtagcggtggcgaagtggtaagcaccccgaaggcaacatgcagaatgacgaattggtctaaggttctaatcccatgtgcgcggtgtgtgtatacccctggcgcttacttagcgagtacgtcgagctatacgggctagttgggcaggtgaccctcggggtcgtaatagttactgagggtcattatcgcttcgaaaacccattgagccagtcagaaagtttaaaggttccgagtaggtaactgaaaaattgccgcataaagattcggtggcattccaaatactttcaaaagtcctgagaaaaaccgtatccatcagcgggccgttcaaaagccgagagagacagcaagatcggttttcggattctgttccgacggggagatacggctggtctcatacgggagccaagaagctcaggtggatcagccactgtcaactttggcattaaccaacagaagttctataacacgataaaaaggcatctgattcgcaattcacaaggtctgtatcgacaattatcacgaagaaagctcgcatcatgtcgactctcagtccacctgccactaccatttcggatgctgttaccgtgtacgaccttattgtagttggctctggtttcgctgtaagcttgacaaataagcggatcgagacgacatggctaatgatgattctcgtgataatgttaggggtgtatgactgctctcaacttcctcgaagataccaagacccaaggaaaggcagcgaaactcgccttgatcgaggccggtaaagatggagaacgatgtggtgccagcaggtagaaccttccgagttctagtgataattgagacgtatgtgtgctgaccagattcattcagatggacaccggccttctttcggttggacaagagtgtgttgcaagataattgcaaattgaagtacaacttactaaagactgtgcagataacaggtttgatagcggcttcaaggatgagatgaaggtaagtggcaggccaatgacttttatattccttgcgactgactatagtctagctcgtcaggtaagcgttctagtcagcccgaagatcgcactttttaattgtggcagtaatggacttgccgatcaggcatactgcgagaaattggaagccgaagttcccactacagtgaagtttcttttggaccgtaaacagattcggaagctttcaatttactcggactgacactgacattataaggtagacggaatcatagtccaacatcaagatgagagaaatgtctacctcggatttaataccggtaagccctttgagaaatccaatttcaggctatgccaaatgctaatgaacttctagaccagaacttcgccaaaggagacgtacgcatcctaaaatgacttttataccagccaatatctaatcactacaaatagggtggcggatatgccataatcctcaagcttttcgagcacatactgtcgttccctcaggtggacattatgtgggagacaaatgcggaggaacttctgactcatggcgatggtaccattcgtggtgtcaaggttcgaaagaacgacggccgctttgacaatgtgtttggtgagcaagtcatgctatcatgtggtggcttcgagggtaatcgcgaaatgtgagtgtgatcaggacttattcgatatgatatgaatctaaaaagtatggaaggctgggccgatacgtcggacctagagctgaccaacttgggttggtagcccctggtctcaagtataatacggggtttgggctcaagatgggcttacaagtcggtgccgcaacggccggctctttccatggcctgcacgtaagttacgcaaatgaagatcttatgagattcactaacccgtcgcagtgtgaacttgttgatactcgctcctcaaagccagaggcaactgtctggggccatagcttcggtatcgtcgtcaacgagtatgctctaatcatttaaatgaaatgagggataaaggctcacattaccttctttagacactccaagcgattttacgatgaagggaatcgatcgtatgttcggcctccagcttgtactagtatcaaactgacaaatgcagcctcttcgctacttgcgaagttattgcttatgagacatggcgcggtaagtaatgaggtaggtcgaaggcgaacatgcaccgctaacgtgtatctcagaccaaaaccaaaaagcatatttgtgagtcagacaaacctatattataaacggtatatggctaaaacgcctccaagtgttaccgatgctcccattatggaccgattccgacctggttgggtttatgatacaactgatctggacccagagaaaggcgagacgatcgaagatctcgccaaaaaactcggtctcgttccccaagaactgaagaagacggtggatgaatataatgcttcgtaagtcagctagcaggaatgtcagagtctcacactaatggctggtggcagaattaatgacaaagaattcaaccctttggttcttgacggcaagagcaccttcggcctaactcctaacaagaccaactgggccgcaccgatcaaagtggctcctttctatgggtaatgctcccctcaaatcatataatctgcttagataccactgttactgatgggtatctaggtatcctctgactgcaaaggttgtattcacttttggaggactgaaggtcgatcttgagtcccgtgtgctctccacgacgggtaccccaattccaggtatgatttctaatatttccttatcacagcaaaatccatcagaccttcgcacaaacacgctaaacttacatcttgcgatcatttcctcactgacacgtcacgtcgtattaaggactttactgcgctggtgaacttagcgggttttattacaatgaggtaagcccaacctaatgatccgttattgaagcaaaataattctgacaaaccaacagagtaaggttgcctccgaaattggaatccgaagtcaatcgccaacgatgtgttctttctatgtactgactatgcaccttagatccaccatgcaacagtgcgctccgatgtcttacattcggtcgacttgcgggcaaaactgccgccaaggctttgtaagatcaggaaattctaaaatgacaactgcaccgcagttgcgagagcatattttagcaataagcaatgaaatcaactacttgaaattcacgaatgttcgcgcggcgccaagacattgcccagcctcgtgtgatgaaatatttttactaagctggatttcattgtgtaatgcaaagccaatcgagcatatggagcttcgtcgagccataagtgtagcgtatatctcccataatatcctggccttgtcttctatctaatgtgagtccgatttcagtcgatttttcacaaagagttgtatcaacgggcaatccatatattcactttcttcttccatctgatgaaaacttatactaatctgcctcaacatgacaattatgggcaattaaaaattgacgatacatgttatacagcctagccttcaagagctttttagtcaaatggatgcaagcccacgaaatactagggaggagatagaatgggccaaccaagacggtagggcccagcacgagaatcgaaaaattgtggatactcccaacagactgcaatgctctttacatctctttctcttactatcgatactacggtcctaccctcgtctaggctcgaaaggttgcaatctatatggattaagtatactgcaaccaaagacgtcgcttactgtttcggaatctcgaaagcaacttccagccgtgagagagccgataatgtatcaaaaacccaagctccatcaatgagtgtgactaaagtatagcaaaaggctttggtgactgtgggaaacacaagagggtatcttgtcatgtggcgatgcaataaaacgggcatttgcaattatccaaagcgcattggaagatttagtatatgaacgaagcatcttggcgtaatcaagacgtataaaactattttactcgtgagcaaacgacactgactttgtctgcttcgaattgaatagcactcaaatcagcagacatgcgtccgtatctgtagggtgtaaagtttagttggaacgcatagtttaggtggcaatgcatcttttagatccagtcaacaatagtaccatttcttttgatctatatacaagcttctcatgttcagcgtgttgattcccgtgttcaataaatacatagggtgatcggtgaactttcctgtcgtccattagacgatggggaattttcttaaatacaaaagtcagaattgaagacagtgaatatacaccgtaggcaggaggtgaacgaattaaacgtgcaaataaaagggcaaaccatgactcagaaggtaatgaaaagagcaatatcgagactcaaacttgtaatttttttcagcctcataaattcgcgtgatccaaagtagcaattgattgattgtgatcacgacgtcagtgtcgacttgctgatatcttttgacaagctctgacttgtcactcttttttccacccgctccatcgttcaaaattccccgcatcgaggtgaaacaaatctagcattcgccccacactctgattgaccagatcctcaaccgacgaaggtctaatgtagaatgctggcacaggtggaaagattatggcaccactccgtgatgcagacaacatatttcgcagatgaatgtcgctcaatggtgtttctctagtcacaaggaccaactttcgcctctctttcagcgtcacatctgcggtgcgtgaaatcaaatcatcgcagaacccggaacttatggctgcaagcgtcttcatactgcaaggcaagatgatcattccatctgtgtgaaatgacccactggatataggagctgccatatcactgatattgtagacgtgatcagcgagagccttgacgttggaaggatggtagtctgtttcgtatttgatggttgattcggcccatttggacattatcaggtgggtttcgacgtgaagatggcgaagggcaacgagtaaattgattcccagtattgttccggtagcgcctgtgattgccaccacgatcttcttgcgtggctcacctgcttggggctgactggcgggcattgttggaagagtcttaggagagcaccccaagttcttaaagagcatggaacaatatcctgtgttggtgctggccgttatggaagcaatggccaagtgttcaaggggggccttttatttaaatatgccacccctctaccttcgttaatctatcgtagccataaaagtcatttatcttgcttaaaatcattgtggtggttgtctttggcttggcaattgctgcccgggtgtagatcggatcctttcgtaacgtatctcctgatggacaaatcgcattcgaggatcgaagctacggctagtggagatcttcggcctgccgggcctgtcggaggggagtgacaatcagaagcctacggatagatcggccggggagatacaagagggtcatagtgtggcatctactatgacgagaataggtaagatcagcatcccgcggctaccacattcctatctccccggtcatagtttacgctaacatccatacatactaaatcgcatgattgagacaactaatatatttaccaggacttgagcagacaaggacgaatccaacacgaatttaattgactcgacttcgtgagatcatctacctttgcatcaacttcaccgcgcaaaacatttgctcaagttatcgccctctctgttattcctgaaacccaagcatcgaaacatgtctacaagaaagctctccgccgcaacatccttgcgcacattccttgaagaatgtaaggccgagggagaccttgtggaaattgatctggaggtggatcctcatctcgagtccggtgccatctctcgccgtgcatacgaaacaggtagcccaataccccttatcaacaaccccaagggtaaagatggtccagatggtctcttccgtattctcggtgctccagtgggtgtccgaagcgatcccgaaactcgcaatgcccgtttggcgaagtctatcgggctgccctccaacgcaactggacatgatatcatccagaagctcctagccgccaaaagagccgacccgattccatctgttcaagtgaaagacgcaccactcaaggagcacaagatatttggcgataaaatcgaccttctcaagatgccggttccacaaaatcacgtacacgacggaggaagatatttcctcacatacggactacacagtgttcaaactccggatgggaaatgggtgaattgggctatcactcgctgcatggtgatcggcaaacggcaattgaccggccttgttgatgtgaatcaggacattggcgccatctgggcgatgtggaaggccctgggaaaggacacaccttgggcctgcgctcttggtgttccgccagcagctgtaagctcttacctattctttttgatattctgtgccagcatcctacgctattttccagaacgctaatatctgaaaacccttcaggccgtggctagtggtatgccacttcccaagttcgtgaacgagccggattatgttggtactctcacaggagttcccgtggaggttattaagtgtgaaacaaatgatcttgtagtgccggcacagtctgagttggttcttgaaggagttatctcggcaaccgagaccgcgatggaaggccccatgggagagtatcacggtcttcttttcccacccaagaaatcgccacagccggtaatgacggtaaatgcaattacctaccgaaccaaccctatagtgccgatcagtgtcgcaggccgtgctccagacgaaactcataccgtttgggccctgtccatctgcgctgaaattctcgacttgttgcagcaggcaaacctaccaatcaccaaggcctggtgcccatacgagtcccaagccatctggtacgtcatccaggtcgatcggaagaggcttgtagaaatgaagaccgcgcctgagaaattctgccgccaggttggggagatcgttttctcctccaagcctggtagattcgtgccaaagatctttgttgttggcgacaatgtcgatcctagtaacttgcgtgacgtcgtgtgggctgaagcgaccaagtctcagccacaggccagtgacttctacttcgtgggcaactatccgacatatgatctagtgccatatgccactcacggcttcaacccccgtgggcaaaaagcgaaggtcgtcaggctgtgcatgttgcccgaggagttcgagaccttggaccggccatgggttgaagcttccttccgtggatcttatccccaagaggtcaagaacaaggtcctagaaaactggcaggcgtacgggtttgagggatctcctgtgaacttttaaaagtcttattgctagggcctttcaactgtgctatctggtctttacgttccttgacgccctaacctttgcttgggaattgaaacggacacacccaactttctcgaacgaagtagaagatggtgttttaccactcacagggttcttcgttggcaagggtgaaggggaatcttgatctgttctaatcattcaacattcacggccccgctgctaatgttctgattctcaatgcatcaactgccgaatcagctcgaaggagcccctttgttttgctactgtaccaaaatcatatagaaatacatacacaaatcaaatacctacttttcgattcactcaatggtttatcttgccgttcaaggttatacctacttctgagattcctaccacaaagaaaaacatggaagtggtgcaagactttgaagaaagtgatcgaaaggataccggcaaggttcaagtgaagatcaccagtacattcgagcctggcgggtgtgttcgtacgaatgtcatgggaagagccttctcggttactttcaactatcgatatgaagccacttcttgctgtcatcagatcttcgctactcgacgtcagctgccaagttcccacgagagaaaatctcccatttcgggacaaaggctagaacaaacaatgaccttgcaatagttgctatcctactcgacccgaaatggccaacggtcatcattgaatcgggatggtctgaggcactgaatagatcgaaggaagatgttttgtcctggctaggcgaatcaggccagcaggtcaatgtcgcactgacgataagggttactccgggggagactgtcacaatcgagcgacgggcactcaataaaacttttgttaagccaatccaaatgatgcagattactcgagcgaagtccgttgcccgagatgccaattctcgtgctaaagaacctgcggtagaattgagggacattaaccagcgagtctccgaggccgaggccgagttcccaaggaggaacagcgagacagattgcatatatcatattccttcccttgagctactggtataacggaaatatgtaggttcccgttgatgctaggaagaaaacgtcagcttaacggcactagttagctaatgacagaccacttgctttttcatgatgataatatagctgctgctttcgacgatttgcaggtgcctcgatacgccctggggaagaaatcggcgaatcggaccattgggagccgttacatattggtacgaatcgaccgtctggaagcgaatagagaatatcaacttcattcattagtttccctgaccggataaggattaggataagggaggaccaatacctatacattacattacaccatacatctatacatctctacatatggagtacacaatacatccatgcgggccgtaccgaccaggcggaactctaatgtaggcacccgttggctctgaagtcatgggatattaaccagctgcacgttgcacgcctctatcacctcggctggctcaatatagccacaaaaggtggtcccggcgcaaaacaattggtctccgaaggacccgactcttcccgctctgtcgccgctggtcctggtcctcggtggccatctgcttccgcacaacccagacccagcctggattcggttggtatctgtgatattgatcaaatcatccatccgagatagatagtgctacttttagttaggacggtcataattctacccgcacctcgttgaatatgtattttcacactaactatgcatatttatgcccttaatgcattcaatatatcaatgtgctagttatttatatgcccggtgcgcatcccctagtgggtcaagtcggtcctcctgaccccattaggaatagttggccttgatgtcatggccccgcataaccccgcaacgttgaacttgcacccttccctaaattcaactgcaatggtttacggttgcagtcttcacctcattctagatcgtttgatgcgaaaggagtctaagctaatcgtatataaaatagaagtagagaggagaatcagccagagatgctaaatgtgacctgtcacagacgggaaggtctatggcactagtgaaatataagccagttattaagcttccttgagtgcccaggtggagacctgtctatttttaccttgtaaggctaaattaaattgacacgggcggggatataacggggattttctgtctgttagcgtttctcggcatccttggctgagaagcttaacacattctcaatataccgtgtcgatttgtctcgtactcgtgatattccctcccgcttgtgcaacatatttgatttttgtgacgtatacgcacaccaccttggcaaaccgagcagcctggattctacatgcactgctaagaacccgtctttactcacacatagcgggccgaggattggcctaaataagcctgcgacgccccggggccggcgagacttttgtactggccaggacaatccacaacttttagtctcaagccttctgcaactgcacttattgcttgtcggtaaatcccgcttccggcttcgttactgcgacctgcagcaagcgacgatccagggacttctgctattcctggctatttttaaattcccgaggggatgaattacctccaaaacctactgcagtgaggggtgattctacactaaagtctccctatccctgatctatcgcgctctccgtgcccgtcccgtctccccgcctatgacggtccatatcccctcatagagaataatgtctcataacaggttctgcagagccgatattccgatgccttgcctcgtttagcgtcgccatgaggggaacccctcagcgaatatttggagaaacgcccgcacctgattagagcgaagggatggtgcaatacggaagcctctgattcataatgttaaacttttgttggccaatctcaagcgtagacatataaaaggcggttgggacgtgatagtagcccgcttttaatttcggttcaacctacttccttctcagttctccccgagtttcttcgaaacgtcaatatgaagttccaactcttcgttactctgcttcctgcagtgttacccttggtgcatgggatccctgctcgcagggatacccccaacccgggtttgcgaggaagcgattcgctggttggacattcgtcatcgaataagggtggcagcgactcgccacctgacatcaagtatactcttgttcctggacagacggaagatcccaatattgggccgtacctcgatttcgagaaagccgataatccacagccgatccgtggttccgcgggggctgatgatcccggtccgagtatgcaatgctattctgattggatgtataatacagagtacactgacattcttttagggaactattactatgacagaatcaatagtgataagcttgcaccgcccggaactgaccatggacagacgattaatgcgcagtggccaatgggtaagtctggtttgtgcagagaaatgtacaatttgctaactgtatgctaggattgagccacaacaggtaatcttcatccccgaacaagaacaccgcagatactcatattttcttaaggcttggatcagatggagctggttgggctcgccaagagaacataaatgtgatgccggatgcgacgctcatggccggtgtcgatatgcgcttggcgcctgccggttaccgtgaacttcactggcatgtggccgctgaatggtcgttggtgttgaatggatcgtgtcgaatccaggtattggctcatctcgaagggattaaataagtactaaccagccaggctgtgaacgagaatggggagacatttatcgacgaccttactgctggcgatgtgtggttcttcccaccgtgagtattgtaatgtgcacggataatgctttatactaattatttatgagtggtgttcctcattctattcaagccctagacgatggagtcgagttccttctggtattcgacgacggtggcttcaacgaggataatacattcctcgcaacagaagtcttcctccacaccccggtaaagaaaagcagatcttacaccaaagaaatccaattgctaacccatacacagagagaggtcctctcaaagaacttcggagttgacgtatcagcctttgacaagctccccgccgacgaattatacatattcaaaggcacgcccgccccagcagacatcgagaaacagaacgtgacaacaacagctggcatcatacctcgcgcccagagctactcataccatttctccgagcagcccgctcacgaagttgccgggggctcagtgaagatcgtcgacccgctcaccttcccaatcgccagtaacttctccgccgccgttgtcaccgtccatccaggcggcatgcgcgaaatccactggcatccgactagcgacgaatggacgtttttcatttcgggccagggccgcgcaacgcttttcacggccccgaatgctgcgactacattcgattatgccggtggtgatgttgggtacttcccgaagtctaatagtcattatattgagaatactggtgacgaagacttggtttttgtggaggtgctccaggcgcctcagtttacaggtatttttcccttgatatatgtttggggtttgtgtactaacaatagtagatatggctcttggtcagtggatcgcgtctacgccgaaacaaatcgttgcggatacgctcaacctcagtgaggatgtacttagcagcattaagactgagaagcaatatgttgtcgctggtcctagcagttagatcgctcacaagtgggctgtttataatccacaatattgataattttcttggtaacttagcaaacctttactagagatgctttatagtagaccatcaattctctgcagtaatgcccaaggctttcgtacccttggataagcagcgagatgagctatcacaatccacatattcttcgtcgttgaacataccactagcagaaagcggaccagcgcgtcatggtaaataacagaaagaaatgcctataacccatcgagacaagctccttcttctccgccttatgttaaggcctgtaaggtgggggtagatcaaggccatcatccggactattcccactggtatgtgggtcattatggtagccaggaggaacagcctctcgatcgtgactcttgggatccaatcccggaatagtagacccaagcacagatgcagattgctaagaatggtcagttgatgcagctccttgctcgatggaattaacttaccccggcccctgagtctgacccatgatttctaataacaataggatcatgatccccagtcttcccaaccaattcattccgcttccaaataccatatttaagaaccagtccctgaaagtccgaccgctcgatgacgcactcagcgacaacgcagtttgtcaaggtagctctctcgatttgactgcgcgagaccgtcgtgccggttactacactccgcttcaccgcgctctggtcttgaatgaccgactgtccgactgtggatcggtgcaccgagctctgactttgtagagtgctgtttatgatatcgctgcgctcgaccgaggccgcgtcgtggaactgcgatttttgacccgtgctccggctcacgtcttctgtcttcgatagtacacagtcacttaaggtggatcggttcacgcaggaattggtgatcgtgcagttgttgataatgcatcgagttatggtgttgccgtccccgctcggtgcgctggcttgggctttatcgttgtccatgatagcgctcgggatggaagtatttgacaaatgaacgagatatgagtaattctctggatgtgtatgtttcccagagcaatctatttcgtcaagaaatgttttggggaaatgtggaaaatttgcgaggatgacatcgggtccgaggctcaacaaagaaagctgttgcctacaattttccagtttgtaacttatatcggatatcctatgttttatatagagtgtcatctaccaggaggactacattagcggaaaatatatataccaacatgattaaaacattgactacgcccttcagtggcaacaattgatttctgatgtccacaaggtccccatgtatatattatgtttatgtaccctttgaagatatctgattctgagaattgtttagtatgcatagacccagcatccgcatggccaattatcgttctcaggcatggtagttggaccgtgatgggagacaatagaaaactccacccccaattcccgcaacgtttcaataccatcctcccagccctccgtgctctctttctggccctcgccatagaacctcctgtatataaccgtccgcagatttggaagctccccggcctccacccgttcaccaatgctatcgaagaaggtaccttttcggtcgaattcattcaatatgagagtctccagactggcaggaagacactcatcaagatcggatgcaccaaattcgtcacatgggtttctttcgtggtacgcatacgtctctatggggattgtgagctgtttcaaacagtacaagcggtcgaaagccggcttgttttctgtatccatcatgtcgaaatcaagatactccacatcagacgagtcgctccgttgtattgctgcaatgtactcggatcgaaagccctctctctcgaatgccccgctcggctgcgaccatccgcctctcatggtgatgtgggtaaggcccgtagggaaggcgaggatctgtccaaatgtagatggttcaatctgacagctaaccaacgccagatctttgagagctgtcttcttaggaggaaataatttcccaaagcttcctgggcgcaaggagtctattatggcgccttggatgtggagcttctcaagttgttccatgtagaaaacaatctcgttttgactaaggtcccacccatctgaccaagaagtactcttgtaggccccgagatatactaaagaaaattagccttttgctcactccatcgagtcagattcaatgatttacacgatcgtagcccctgtcccacgtatcgactggggggctcaatctcagcattatctttgttttgcatcaggaaaacgagtagcgtgcggttgattttggacggcacgctgcgcaaggtcaggctttcaaggttttgcatttcagtgatggcatcaatgagaggataatagatttgatcgatctgggcatcatgaaagtgttcctggaagtccaagacaagagaagataaccaagagctttgctccaatgtcctcgcaagctgctcacagttgatcggattcgtcaaacagatcgaagtgtagagtaatggcgttgtgagaacctggaatttgctacaagtcaacgtaagactgtaaagagaagatggtgatcgttgaaggtgctgaaatatcatctccagcagttcaacaggaagatttagtaaaatggagtctgggacagtcatggtcggtagattgtgacaagagagaaaagatgcggaagaagtattgattgtctatcaatgagcagaagctacctagtgaagagggaacactgcaacgaaggcagcaggggtatcgacagcgaagactgggtaaaagcagagtcgttcactgaggagaacaccgggatgactaggtactggtggggtattttatatccatggaggatcacatggccacttagtcatcctgctctggaatctgggggacactacattattgagtagtcagaaatcagaccaggaactggttaacatgagtgaaataacagagtatctgaagaaacaagcggatatcttatgccgagctcactgactcccctaaagcggccgacttgcaccgacggctagcacagctatggccatcgaagtcctataccccgatattcttgtactccaactagatgcgtaagtaaatacccagctttggtcgacatagaaaagtctacaaatctcacaggtatcattgaagagtaaaagttgctattatgtaaatataagttgaaagggacttcatcccggaaaagaatgtacatctttagtggtttagcaaacgtatcaggtctgctgtaaagccataatatatacctgaactgttccaacagactggacctattccttcagatccgcacatccgagggcgagggtgccaccctaaaaccagttagttatggactctccgcggatgagtctgcgatgtagagtatcacttaccaggaggttagcctcggtgcagcactggggcttggtatcacagctggatgcctcgtacccgtggcctgtgagaaatgttagaagatatcccaataccatctggtaaacataacaagatagtccaaacatacagagaagaccaatggatccaacgatgttggcagcatcaatgccaagagtcaacaagagggggtcgacaagggggtcgagaggagtggtgagagttccacagcagaggaggggaccgacacattcagaagtatcagagcgcttcacggagaggctggactcctgagggagggcggacaccatgccggcgccagcgagagaaaggacggagaagatagagagtctcattttaacggaggtttcaagttggttgttagaagaagagaggagtagttgtgatgaagaaaggattgcgattgtggatgatgtctggaatccgtggaatatcctggtccttatatagttttcgagacaggatatctaggtatcaattgcttccaagaccacccctatgttcaataattgagtaccctgatgatctaggtcagattgtggaaactcgatttgtgagtcgtaaaaatgaacccccgagtagttcctttctcaatggatcagaagatctgcaaaactctagatagcattggtcccagtgtaagaggtcatgtgagaggtcttgaccacgaaccgaggcagagaggtgctggaagggcagtccctggtactggaagagtgaactagttccttagattgaatcacatagttcatgatgtggatatccatgatccagatgggttgtaagcgagctgtcttggctgtcgatcactcttgctccatgctcactgcggagtaactccgtatcatggaaaggcttgtagtcactggctgcaaatgccaaatcaatatacaaaaccaatagccagcggggcaaaccccggttgtttcctctcccatttctccggggatttccttatcagtggagccggttccaggatcttccctggcaccgaatcagaactgccaagacgtcgatccatcacagggaactcgcagagcccattctctccgatcgacctatcaaccggaactcaattgatgaacaggaaccaaatctctgatccgtagtgctgcagtctccgcaatctgaaattttatgcagttggcttgcgatttgtcatttccaaccccggaaaaaacgagatatttgagataagtctcgcaccgttgattgcacggcaacgaactagttttcgagcaccaaggggttaacattgtgttgatccaaatgtcttggactcttggtaaaccgatctgggcaaagttaatccggatgaccattgttcttcattggatcacttgaagtttcgtacatctcggcttcccctgattgtcgtcatggtccgtgacgatcttgataagtatgtctgaatgagttacgtgaacgattggatccaacattagaagcagatatcgatgctgtgccttgtttagtctgtcaactaagagccgtggtcatcatctcaaacatagtctcaaatcatatcatcttggctttcaggggattcggtatttgtcattatcaattcgaccatctgccgaaaaacaggaaaagactgggcattctcgtggcgggatctggtgagatcctgggtcaggacttaacgggtcattgttggccatgggcagagttcgcatgggcctgcaacatttcgtggaaatttcttgaaattcagataggattccggtcataacgatgaagaacgaagtgaccagggctggtaaagaaacatgtggcggtgtccatgtggcggtgcttgttcacaccgccacaccctcgcgacacaaaaaacctccccccctcnnnnnnnnnnnnnnnnnnnnnnnnnnnnnnnnnnnnnnnnnnnnnnnnnnnnnnnnnnnnnnnnnnnnnnnnnnnnnnnnnnnnnnnnnnnnnnnnnnnnnnnnnnnnnnnnnnnnnnnnnnnnnnnnnnnnnnnnnnnnnnnnnnnnnnnnnnnnnnnnnnnnnnnnnnnnnnnnnnnnnnnnnnnnnnnnnnnnnnnnnnnnnnnnnnnnnnnnnnnnnnnnnnggtgccgtgggggcggtgtttttcccccccgccacaccctcgcgacacaaaaaacttcccgccttcaattaatccacaccacattccccggggttatcgatcaatcaacccctctacctttttgatttttgagcagttgcccagcgcatattgcccatagatcacaataaaaatgccttcaacatctctcgccgacctggtggccgccctccccttggaggacacctggggcccctccacctccgccgataacatgctttccggtgtgccatatgctcctttctccaagggcgacaagctgggccgcatggccgactggaccgccgagaccaaggagcgtcagaaccaacgtccccagtacaaccgcggtttcagaggtatgttcaccttttttctgtccccaccaagtttctctttcagtcgaatagcaatggctaacagtcccattagaccagcaggtgtacggcgccggtacctccaacctcttcactgtcgcagccgccgaggacgagtcctctttctccgtcgttgacaacactcgcgtccagaagcgcggtttcggccgtggcggtggcaccgttttccgtggccgtggtggtcagcgcggcgctgctaaccagcgcggtggacgtggtggattccagcgtgctggtcccaatgttggccgcggtcagcaaagtggctaccaattcagcgaccgtggcggcgcccgcggtggccgtggtggccgtcgtttcggctggagagactacgacaagccccagcgcattcgtgaggcatctgtcaacattcgtcctgactggaagatgctcgaggaggttgacttcacccgtctgtctaaactgaacctcgatgctcctgagggcgaggacctcgagacctacggtttcctccactactacgacaagtcctacgacaagccccccgtcaagaacgccgagcgcagaatgcaagccctcgaccgtgctgcctacaacgttaccacctcccaggatcccgtcatcaacgagctcgccgagaagaacgccgctaccgtcttctctacctccgatatcctgtccatgctgatgtgcgccacccgcagtgtctactcgtgggatattgtcatcgtccaccagggcgacaagatctacttcgacaagcgcgacggtgcctccttcgacatggtcagcgtgaacgagaatgccatcgatgcgcctctcgaggccgccgaggccgccggcaagcaggagcagattaacacccccaacgccctcgccatggaggccaccatcatcaaccacaacttcgccctgcagactctgatcgagtccgacaagaacaaggtttccttcgccaagcccaaccccttctacgatgagaccgaggaaaccgagcccctcgcctccaagggttacaagtaccgccgcttcgacatctccctcgagcgggatgaggagcccgtctccatggtcgtccgcacagaggtcgacgccgtcatgaagggcggccccaccggtactgaggaccagcagctcatcatcaaggccctgaacgagttcgaccccaaggcccaaggctccggcggtgccctcgactggcgcagcaagctcaactcccagcgtggtgccgtcctcgctaccgagatgaagaacaacagcgccaagctcgcccgctggaccacccaggctatcctggccaaggctgacggcatgaagctcggtttcgtgtcccgtgtcaacccccgctctgctgctgctcacgtcgtgctcggcgttgctggctacaagccccgcgagttcgctagccagatgaaccttaacctcggtaacggttggggtatcgtccgtactatcgttgaccgtatccgtgctcttgactccgacgagcccgccgataaggtcaagaagtacgtcctcatcaaggaccctaacaagtctgtcctgcgtctgtacagcgtccctgctactactttcgaggaggatgatgaggagcttgaggaggagaaggagggcgacaagtctgatgaggctgatgagtagattttgttctgatgaattatgttcttccttaaatgtgcatactcgacctaaaatttgatgcttttatactctgactatagagtctaaccacaatctattcaacaaacttcatttttccagacaaacttgacttttattatctcaataactaaaccattatctgtgcaaggagaagataccgtttggttggcacgtccccggatcaagaagcctgttacgcggatgattcattttagtaatgcttcctttatgtgttgcccgtgatgtccatagtcgagtaacacgacttttgtacaactttctcgggggaacacaaggaacgtcttgggtgcctcctggtgacttttggcggttctacgcgccgaggattttctgacgtgggtttacgggtataatgctctttttggatatggatacgcttatcgagaaggtgttgtctgctgatatttgagtatcatataaacttagtgtcattagagtagagtagagtgatgtattggaagcaaaattcaaagcaatataatccattgctctacctgataggaagaaaggcaggatatttccgatttatatatcatctgtaccgatgatctcacctatatacaaccctcccagcgggagtgtcgaagacaaagaataagagaaagaactaaatatagtaagagtcaaaataaaatagttcacaagcacaatcaaaccgaaaggcaggcaacaagcaaagacgccgagtcactccgtggcggtagccaacacaaacaaaaagacagattctccagacatcagatcataataattttcattgcgtccgaccgctcaaccatacatcgaatcatcgggcgcagacatgctgagatcgaccttggtgccgagcacgctgctcagacaatctatcaactcgaagtcctcgaccacagcaccgaagccgtagcagcggaccttagtgttgagcgtgtcgataatgatcttgatatcgtcgcgccgcagtgtcgggtacagatcgtggttcttgagacactgcagcgccatgatgggcgtgatctgtccttctgtcacgagctgtcggctgaggttgaggagtgtgctgaggtttgcatgcggtaggtccggcgccttgtgcgggtatggttgttcgggtgtcgttttcgcaatgtagctcggcggtgggcacgttgccatcagggcgtgtccggaaaacggcatgtcttcgtcgtcggcttctgtgaccgaccgccggcagaggtagtctgtgtgttcgcgacagggaccttcgagtctataggatgtattcgttagctcgtgtttgttattggatgagaatgggcctcacgttaggataaagtcaacctgcaactgggggtcggtttcgaagacacctccccgcgtaactggcatgggctgcatagtatcgacgggtgcgcacgatgaatgatccatgctcatggaatgcccgcctacactcgtgtggtacacttgctgttggggcgcatatccgattgggggcgagatcgaggagtgatccatgccattggcgcgggggctcaagtcggatgagatcgtggttgcaggggttgtgttggggttgctggtcgagttggcgagaggggcaatctgcgacgcattgctgctgccagccacagtaacaggggattggaaggacatcatcggtgggcgctccgcccggcggcgctctagatccgcttcgtattggattccgctcgctgcgagaatttccttcaggatttcgttctcctctcgtatcgaatgcatcatctctttatgttgttgaattgatgcgttggcctctgcgatctctgtggtgtaggcctctcgtaaccgcgatacttcggtctccagcgctcttatgtattgttcctttcgctcgcgatgtgtcctgtatagatcagtccagcccgatgttctcgaatccgcaggatttgtacctctgggcctgacgatttaattcctgccgcctggtgagtgcaggcttactatccggcttggggccgcgacgtttgggctgctggccatctgcaaaggcttagtcgtggtccgaccgactggctgggatcactcacctcgcgtggtcttcttcggcccggtaccacttgtggcgctgccactgccgcctcctccgaagatcttaaatatttcggcaccgaagcctttgttcgatggggtctgcggttcttctaccatgtcctgcaccgtgcactccggggccgtgggccgagccggaggagcatgggcgccataatatcagcaactaccgtgggaatgccataaacagtggatatttgcttccggtccggaaaagctcagggtggtcggggagggtcagctctggatagcttaggtggcgagaaccggggaaacccgctgcaattcctcgaccccagccttcaccagctttaccaggtttaccagtttgcagactgcttgcagactgcggagggaccagcgaaatcaattggacccgtgcattccagcttatgtggcgatttgtacgttgtagaggtgctggataccccccgatcgcgaaccaccgccagcagaccaaaaggaaatgtagcactcaccaggatagcccattgcatgatccatagggtaaaccccaccactgacagccattataagagttttcgcggggaagggagaggcaagggagaaggttaagtgtgaaaatgagtcgagaaggtatgaagtcccgtgtctggagtctggagagtataatataaggaaaagaaagtggacggccgatttttgtacaactccttttttattttactttatttaattgtttgataattccttttctcttacgtttcttattaacggattttacgcaaattaaaatcaaaaaaaaaggcgttcgatctgtcttagggcccactgcgctataatcaaacggccgtgggacccgactcttttcgttgacagatctagaactggcagagattggctgaacggggtctaacgtcgtatcagttgacaggaatcgacaggaaaagatacgacagacacgacagaggcaaaatactcgacactttacacactcgatgcgttactagagtcatgagaagaaatgatacatagtcggtacgtccttatacgtgtgttatagcactacataccaagtacttatgaagtaccaggtacgtgcgaagtcagtgtgatcagtcaactgggctgaccaatcatccggccaataggcttggagacctccaggcacatccaatagtctcccatgctgagattatcgagattatcgagatcgcgaacattcccagcactgacaaataatacgatccctgggcatctgccctattcccactagtgcacatcgaatacaataatgcgcgcattagaaacggaataatgatccagctcccggactcgcagattctagtgcacatcgccgccgcaagcaccgcacaagatgacgcgcgctatagggcgcaagtcgccgccatcctagaattccagtgtgctacgcgccaaccgctgatgcagatgagcaagtctttttccaatgatagagacagcgcgcatccattctccgctggtgccgccgtgcattcttcagtgcccccgacgactcaacacgaggcctcgccaatattgcgggaggcgttccggcccgcagacacgaccttaccctcggatcaacgcttgattcctgagacggatggcgcggctccacgtaacatcatctcaaatcaattaagctccttagagagtcttatcagcgtcattccagactcccaacccgagatcgccgacgagctagtccacgccgagcaatctcgtgcagaactatcgcctcaaccgcagcgtgctccaccccccaaaagacgtcgcatagccccggcctcccctgatccggctcaaccggttttaatttcagactctcctgcaacggaccagcccgctgcacatcacagagtgatctccatccagaaccaggtcccaatatccagcctaggttcagttgagggcccttccacaccctcgcatcacatgtcgaccaacactacaacccctaatcccataaatctatccactctccccctcgaaatccaccctccaagacccccaatctccactgcctcgttcactacccacataaccccaaccctatccatgctcacagagcgcctaaacccagcacgcatctacaacccatccactcaaacccgccccctcgaccccttagaacggggctactggctcgtgcagctcgccatcgaggatcaaacccacgaacgagaccgagaccgagatccagccgatcttcctctagtgccatccccaaactccaagcatggaaccactaatccaaatgcaaatgcaatgttaaactcaaacccaaaagaaaacaaacgatcctggccctccccgctcttccacgccttctggtccttcctctcggacttcgtaggcagggacggccgtgcgggttggggcgtctggtgtattcttgaggctgcgacgcccccgtcaacgcgctcgtctaacacgcacgtctcgcttaaagtctatgcgtggggcgaggtcgctatgcacgtctacctgttgctcttcttggcaagtgagcgacgggttcgagggatgggtgttcagtggcgggatgcacgagaggaggttgttattcagatgccttaggatatggtccttgggtagtttgtttggtttggggatgggaaggcatgttgatatttggttgaaattgtgaaattataaattatacccccatagctttgcattgcgataatatcatttgaaattttgaatcttcaatttcatattttgatagaagaagggttattgtacatgctgaaaagaagaagaaaaagaaattccgtcgaggatgatagtaaacaacaaggagatagaagtgaaagccatgttttcgcgaggagagatcaatggaaatgattgaattcaataaatgagcaagtcggagtcagcgagtctccgacggtccctccgatgcgccaggtcgccaattggaggaaagaaaaaaataatgacgaaaagtgtgatcaaatcagtgcatggaactagtactgcagttcgccgctgccagaggcatcgactgcatccagatcctcgtagctcttcaggctgcggccttggacggcttcgcgcggggccatgggacctccgctggaacccattgagtctgggaacgggttggcagcggccatgttggctgcggggtggccagctggaacgctgacaccaggaggcggtaggcgaccaccatacatgcctggcatgccgcggggagggctcagtcggccgtttccattgaatcggcgacggtcgtacgggccgggtcggttgttgcggttctggccgcggcgcatgggtccgggttggtgaagaccaccgtcgtgtcccattgcatttccattccagccggaacccatcatgccgggaattggagggaaggtaggcatgtttccattgggggcgtagggcatgctggcaagggtgaatccacggggagtgccggtatgaccttggccggagccaagtgggaagtgaccgttgctgttggcatcggatcgggatggggcaatgcgtgctgggtctaagacataggcattcactaaggcgagctatgatgactgttaatactgggaataatcgttggatgatcgcacacttacatcgttcttgatgccattgaaccactctgtatggcgcttctcgacatgcttgcgccagaaggcctcggccttaaaaagcttggtacattcaggcgccttgcaccggtacttggagtcgtcctcctgcttcatatatttcagaagttcatcctcaagcgcctgatcgacgggcttgccgccgagcttgctgagatcgacgttctctggctccaggatctgcagtaacttgtcttcgaacgtcttcacccagttaaaggcacgttgcagttgctgttcagatttggaaccatggcgctgtccacgcttctcctggacaggcgaggagggatcttctccttcctcactaggttccttcttcttggccgggaatggctggccgagcgcgctggctcgggccacttccttggcctgggtggaaagtccggtgcgcggacggcgaaggtgtccaccggggcacttgcggccgagttcatggactgagtcactttcaaagacacagaaaaagcagaagttgtagacccgacgtaggtattcaacaaccaagtctagcttcttcttcttcactgcaagttcctcatcatccacatcttcttcttcggaaatttccttctcttcaccttcctcaatctccccttcgtccccttcatcgccatatccgtttctctgcttcttgacactgactggtcccgtagcagggggctggagctctcctttgccgcgcaggtcgtcaacatactcttcgatcttggtgaaaccatccacagagatgttcatttcggagtccagtttggaagttaaacgtttggccagctcgagatcacgatcaattcgctcaggtgcggagaacagatcccagagagccttcttgcgcggctgagcaggggggacatgaaccccgacatggcaaacaaagtcaccatggacggaatcatggatggtcttgtcattgacagcctcgagagctttctcagccgggctgattgtgacaccaccgttcgcacctccatcttggtccatattttcgaactcttcatcgcgtccatcccctcgctccactgtggtgtttgcggaaggatgcaacatgatccatcccatgcgatggaattttttagatgggttcgggtcgctgaggctcagccccttgaaacctccatcttcctcgccgagatgctccttacaaaactcctcgatcttgctgcggctgacgttgggtgcgagggtttttataaggagcgcaggctgtgcaagagcttcgtcacgaaggtctccgccacggactggaagtaggtcaagcactcccatggtctcagcggtagccgtagtctcgccttcctccttttcaaccacaccaccggcaccgtcgctatcgctcttgtatatgccttcaagggtaaagtccttgaaaaggttattttcaatatcatgctcccattgttcatatgcaccttgtcgaaccgtcatgagacgggcgcgaagaggatctctgacttcaggaagatatcgttctttgaaccactcctcgttacggtgctgctggacgaacagcctggccagtcgaatttgcagatcaaccttgtatgtatcataagctgcctggatttgcgcacgttccttctcccgatcttcgcgcgcctcgcgctctcccttgactcgacgaccgccgtttttggcgcgctccttctcctcattcacagattcctccaatctccaccactcggcaaaccaattgaatccgacttggaaatccagtgtaagaggattgggcatcgggttggtcggaataggacgcttgccaccactactgctgtcttgtccgggcacatatcggtcgatgttggccacagttggcgacggggcacgtcggcggtcctcgcgctctcgggcagcatgctcccgagaattgttgtagaagtcctcgcggtgagaacgacgctccgaaggctcgtaccggtcaatcacgggcgagcgggagcgcggccgtgcacgtcgccgatcttgagaggctagtcaagagttaatttcgccctcctctctccaattctcaatgatagacttaccgggcgaccgacgtctgtatgattcccccgtggctcgtcccgtaaaagaatccgactcacgattcctcccgggagatccataaccatcgtaggagtccatcgttctcaacctaccggatagggatcttgtatcgccttcgttgcgatcaaggtatcgatagacccaaggactcagcccaggtggataaagaacaaacggaacagtttgccttgatcgataagggagtcgggaccgtagggtgagctaagatttggtatcgtcaacaacagaccaagcaacttcatagagcgaaatagcgatggtggcgactgggaagttcacgagggataacagaggcaggggtcagggaaaataaagagacaagaacacactgctgctggcgacatgtcaaccccggaacttggcaggggttggaacatgtttgcagcaggtggttttggatagcaaagagagattatgaagaaggctgttggccagagccaatgctgttatgcatataaggagtcatagcccacagaatccagcaatgcgcagctggcgccacggcttagaaaggaagaaaagaagatgaagcaggggaatggaaaatcagggtcagaggagcggaggctgatagaaagagaaagggcaagggacaaagccaaagaatgaacagaatccgattggagaaagaagagggccacctacaagaagcctcgagcgataacgtgacagttggtgataaagggaagaaaccgagaaggcggacgaagctggagcaagcttgggcgcttagccgaaaagggtatggcgtcacggggatcactgacatccgctgattggcgggtcctcaggaacaaggccagatgacaattgcctgccctaacttggcgacaagttgagtggaatttgcaagttaagaataaaacgagaagagggagggaaaggaaaattggttaagttggaaaaaaagtgagcccagattagccacgctaaggccgccacatatgaatgaagtacaactctagaacagtcaggaggccggcaacttgactgttgttagtaatttacttcatgggaatctgcttcagtggtgtaatacttgtctcactgaagggcctatcaacctgttcggttttctgagcccctgatcattcatgttggtcgccaggtcgccaggtcacctttcgcttgactacatgactagcgccgacaaacgaagtgatacatccatgcatagatcccggggctacggagtaattgaaatatggaacattcttttcggcttttgtgaatatgtatgtctataaattgtatacagggcgctgtatatatctaaaggatccaattgcaatgacaatataataaaaagaccaggtcttctcgttatagtcactacaaggctggtattatttataggaaggctaagtaactatagaacgaagcccagattacgcaatcttagaggaagattcttattagagcgccagagcaacaaagaaaaacagtttcacttggggtcaacttttcctcttcacatacctaccataaccacataaccctttcgatataaaccttttgacagagaaaatagtgcataggaagtttgggtgtcatacagtacccctgtcagttggacatgtattgttacttacgtagattacctagtatttccaaatgtgtattcacttgtatatattcaatactccgtacatgcaaccgcctacactctttgagtgattctctagctccaccgccgagataaaactagatcatattagaatggcaccggaatatcaatattcctgtaccagtctcgataccgtgatttacttctattaaaatacggtgtctcgtcgcgtaactatattggcgatcctagggaactagaattttccatggaaatgcaaacaaggcaaacaccagagcttgacagtgcctcgagcatctggcgacctatcactcgtgctcatgtctaagtgacggtatgagaggcttactcgacaccagaccctgcaaatagtgacttgcattaattgattaatgtatctgcagactactcatgaacctgcttatcatcatactcagcctgtcaaccacagtcctctcttcttgacgccttgtactgtatcttcatgagatgttcatcatttttctcagagtctgaagggacactggttttaccacataatcatcgatccctgccaattgcgcttgttgttgcatctcagcggaagcgactccggtgacggccatgatgcaagcttccgggatgttgttctccttttcatactctcgaatctttgtcgtggcggtgaggccatccattaccggcatggagagatctgacaaatcaggtcagaggatattttcaagactgaggtgagataaaccaacccatcagaacgtaatttatgcggtgcttggactctttgtatctgccaagcgcaatcaacccattcgtagctgattcgtagctgcagcctagtttttgaacaaaggtagtaaggatctgcaaaagagcctgttagcacacctaagggattggcagggactatgccactgtacctttaaattaatatcattgtcatctacaataagaacgtgcgctctgtcatcgatgatcggtggctccaaggtaacaggaagagttggcgcgggggtctgtgcagctgtgttagacattccagatttgggccgagtatttctgcgagcgtcatggtcgtttgattgcagagcctcctgcacaaacgccgtatcacatttgggataaggatcttgatgggtctcagatagctctaaatcagccaatattgagttgacagcctttcgtagtttttgggggccatatctattccaaattagcaaattagcaaggcatttgtgagaatgatcctagtacgcacggctgagagacgcgaacaagattcgccttgaaattgccctccgcaattgaaagcttctcacccagcaccaagaaagacttgaaccttgtttgaactgagaacaaagaaccgtcctgcagcgtctgcagtagttttgcttcctcgataactgcaaaatcgccttgggcgttttcgactgactctgaaaatgaaacactcaagttcggttgggctaacaacacctcgccgacggccttttgaatcgatagtttacgttttgactctgtgctttgaatgccagtgggtgtctcctgaaggtcgggatagccctcgaagccgattagacatactcgagtgggcggaattgggacggccggtttgctgtacgggtctaacgattcagaactctccgcggtcaaggattgaaccgggatgtagatatcgatttgtgtccccatacccatttcgctctccacgtcaatgtgaccgcccaggaaggtgacgagcttgtgcacaagactgaggcccaggccaatgccctctgataatgattcttcctgagaaaagggagagaacaccgagtgtcttaaatactccggtgatataccacggcccgtgtccgttactgataggtgagccagcacaggttcggaatcagaattagggctgatatttgacaaggacacttcgatgacgcccttccgggtccatttcatggaattgccaacaagactcatcaaaattctcctccaagcaccagctaccgtacgcactttccatggagtcttctcttcgatccgaatgacgacattgagattttccatgtccctggcatttgtagaggggattgcaggggtcaaaaggccctcaacgtttgactggaagctctgcctatccccggtagtctgcgatgaatacatgattccagtcacgtcctcaatgaggatgcccaggtccacatcggtcatcaatgtcgtcatatctgccatcaagctatcctccctttggatactattgatcttggtgaagtctagtctagaagtaatgatagatcagcaggagataatgcgtgaaactgaacaaaacttacagatggtccaaaacatctaacagcgttagaccgcacgattcgatcaacttgaccatatctacctggaccggctcaagggcagtcgctcgtagcagctcagtattaccaagaactccgtggagtggcgaacgaagctcatgactgatggaggagatgaaatcagatttcgacttctcgatggcatcccagttgacgcgggcaacttctgaaattattgaattcccgaatgccttgaaaaatccgagctcttccgaacctaaggcacgctggggtagtttcgtccaaactagggtcccggccagccagcgtgatttgttccaatcccataatggaagaaaaaggaccgagtctgcatctgggaactgtgccgctaaagtttgagtaatgtcattagaagcctccaactctgcgggctcgttatcctcaaattgatcgctcatattgaatatttgaccttcaggatatgcatcaatcattattctcaagagtttctccgtaacggcgactccggagtcatcaggtgacctatgttctgatattccaagtgcatgtccaaaactctcgcacaatgattccgatacttctgatgacctcccgttatgttgaaagggttttctattgatgaggcgccgtaatcgtcagatgtttcgttcacgaagcaaagggtggatggtaccaacactccagagttactttggtaagcatccaaaaacattaccccagcaaggtccatggaatccctgaggatagcactagcatgggagaagattgaagcaatgctttgagaaatggctactccgggctttatccgcgaagtgcggaaatgagaactaactctatcacgcgtggtgtggttttcattcagtggagtcatcgccgctatttgtccttcgaagctggaaggaacggaggtgattcgtgtctgatcggacctttctgtggaaaatgacagtgctgatatctcttcggcgattgtcgttgactccagaactctggctgcctgcatcgaaggagacaagccgctctcaccgtcgttagccgactgagtatgaagaggtagacccgaaaatgtggcagttggtttcttcagctcagcatcggggtttggatggtcagtgacaaaatcagccactcctttgactaatttctctgctcggcggtgaaaatgcacaatccgggcgttttcaagatgatgggcaatagcatccgcaatttcttgcaataaagcaacctcgtgatccccgaatacgtcacgaggcttgtcgtccactacgcagtatgaaccgagcacatgccccgaggcgctgaacagaggtacttctgcataaaatcgcatatgaggccagtcaaccacgtaggggcgattcttgaaacactcttcggctgcaaaatttcggataatgtagcgggtgcggtccgcggttatgttgggcgtgttaagttccaacgaaatgtcctgggccgtgaataacttgattgtgtgagggcacaccccccattcaaggttcaaagtcctgaaccctagatatatgccattatttggtaaatgctgatctttatgtcgcaaggatatggacgctgtcgtttcggcgaggatgtgttgactttggccatcaataatggagatgaatgaccgatcgcacccgaatctatagacgcctagttgacctagagcattcagagtaatatcgggggagaggtatgcggtatcgggctgctcgtcatccaccggtgcagctggggtaggcgacggattgttcacatcgaaatttctgaaagtgcaatagtatctggagactatgtcagtaataagggtgctcaagactccttcggcagaaaattagatcgcatagaatgagatcaaagacgcacttggataattctcggatgcgatctcgctctgctcgagatggcaggggaagatctggcctgcgagcagccaacaaggccatatttcacttgatgcaagtggaaaagggctgagagaggaacgtataagtacgtacaagatgggagaggagttgagtcgagactggaaaagcatgatttcacaggtcgttattcttgattgccgacagactccacaaaggcaaggccgactattggccggctctggcagagcgacccgtatacttggatccggggcatcggttcttattacgattgctcctactcgagctggaatcacttggcatctgcgggcgcaacataatcctccgcaattatttcgaaaaattatgctgaggctccactagcaaaaaaaattagatatcattggctgcgcacggaacgcagaagagtgggaatgggggatcgccatgaggatggtacctcaaaatttcggtataagcagaaaccaccttttgtatcgccgtcagggggattcgaagaaatatagatagagtgcgtggcaagggaaagggggtggggggagacattcctaacgcctgaatgcatgcctcagcgtatatcgtgggtttttcaagcaggcgatcacacaaagcctcgagcatgactagagtgatactacaagggcgtccacatttaatacgttgtgctttaatgctgccaaacattcgtatattggaaaagattctcaggatgatactcttgtagcagtctgtgccatctgcgatatagatagttccccactgaggatcatatcatagataagttcatgctttgcagaggctaggttttggcgccatcttggttcggccactcgtgattgattgttaacatacggaacttcccactgtagtagggtatggagctgttgcaccaatttcgggacgtactatactcaatcacatgctacatcagtcttcttacgactcaagaagaacgagatataatgcggtaatgcataccatatgtataggtacatatatatcgccctcaatcttgacagatgacacaaattcaggcaagaagaagaaaaaacccgttatgacagctcaactcacgatgtccccacaggtcttttacaagcataaccttggaatatttgatactagtagggccatgctcaccgctgattggctgaccgagaccaccgcgatcgccaaatcgcaccagcataacacgccacattttgacctccgatcgaacgaccatgtccggtctcttcaactctcgctgggcacccgtggatgggggaaacaaaacatacccggcgagtcaaaatgcgccccggtactggtcctccaacaactctaatcccggcggtcatagcagcgtccgtccgacgactatcacatcccaagacggccgtttgctgccgccagccgaagaattggctcgatttatgaaaatcgtcgccaggctgcgatggaaacttccatttttagctgagggataccgccttgcgacactggaaataagcgatgtcgtatccgcagacgatgtcgcgcacgctgaaataatgttcaagatcgattttcatgaatattatgctctgcttgaacgtgctattgtccacttactggcggtattcaatatatcggttacatcctcgcctcggggaccaccagataatgggaacggcgtcggtcggcctgttggtattcatcgataccacgccaatgtgctagaagccttgcgggaacagtcaaccccactctccccagttcttggcggtggctctgtttatttgcaattgcaaaaggccaaggaactgcgtaataggtggaaaacagctgatctgaccttggaagaaagagaaaagcagggtgaaagaaaggacgtcatgacactcgcgagctttgacttcgaaggtatcatctctgatatttttggtggattagaagaatcatatgttcgggcaaaagagcatgtcgataagtgcatccgcccggaggagggcactggagagggagcaaacaccgaggcggactgggggttcatggtcgatgctatggattgggaagccgtatgagagttggccaactgcagattttatggcctgtgcttgatgtgtagccagtgtcaaatccatggttcgataaccaggtgcatgctctcattgctatgcacacccctgttagcactgcaaaatggctcgatcatggtcttgagtcacccaaatcctgttatcggtgtacctcaacaattgcactcgctagtgggcggttcgaaggttccccagctagaaactttgttggacatcgctgcagtccttggacattcttgctttcatttggcgaagaaaagacatgtcacacctttgttgatcactgcaaactgaatgatgtacatattagctgaaatgtgctatgaatcaatatgaacggagttgatattttggggctaaataagcatctcaacttgtcttgctcgtcgtccaacttttctccgatcaagacccgcagatgacttatgttatctagaatgagtagcccatgtaaaaaataagtaacggttggaaccatccctatcagtgagaactaaagagctaccgttcttagatgtgatgtgatgaaagttgaaaattctgtcatcacgactttctctgcgtggatttcaagaaatcttaattgatattttaactgcctcttatttttgaaaattgctcgaaaagcatgggcttataacctgttgagcactacgatgtgtgcccagacgagaagagagagataggtaattctgactaaggtaaggttgaattgggaggcaggagctagaacgtgcacgatttcactggccttcgcgttggtagtagaaatgcagaggtgaggtaggagttgggagtgtacctcgcaggtactgtccgatgtcgtgagcatgatggatatcttggaagataatcatgtccatgatcttaattaaaatgtagcccttaagtagcttatccctaagaaacttacggcgggtgcgccgggaattttgttcatgtaaccatttcggcaatttcctgccacagaagttcaggcttcttatcacgacctcgagacaatgctttcacttcaatgatggcaaacttctctgggaatgcccctgtctctagacagccgtctgtgagtataaccatgttgccaaaggatgctttgttgaatggcgagcgtaatggagaccaggcatagtgcatctcggagagatggatcatgaggaggcgtggtagagtttcgttgatgatttgctcttccagcgcgatgtccatataggcggcagctcagctgctacttcacttatcgtgatagcgatttccgactgaaggtcatttatttctgacggcagtctcaattggttaaagtagagcctgtgcgcgatccatcttcgaggagtagttggttctagctcgaaattcggtgggatcctgtgctgagactgcgcgacaagctggaaaacacccatattccgattagcatagtattttgtatgctcaccgatgtgcgcgtatactcacccacatattccaggaactaggcggcgccggcaccgatatctgtcttctttgcctcgtcgttcattccgtactccgtaatcaagacgagcgggtggatgggatggccttctcaccatttaattctaccgggccatgtctatatggcctttcgcttagacgttaataagttgtgcataggggccagcgatcccgtgcgcgttcaggaggaggagatggaagttccatagataggtactggctggacatgttgaagttcgtagttgcctcgtgcttgaggtcgagagccttgaccacctcttctcgggagagaattgagagagatatgggtgagtgagagatatatggcggtggtgcctacctcttgggtggaagctcgtgatatttgacagttgcgtgaggttgatggagtcctttgtgtaggcatgatcaagtctatctgtgcgtaacggaagacaatgtcgtacgtgtgtgcgtgtcctgctcatcgtgtttgaggtgtaagcggtgttgctggcttcaccaaagagaaagccgcggaatggttgcacctttgtcttcttcatcaattgcgtataagatgagaaagaagatcagaatagtgagatggcagccgtggaggacgagagtaaagatggtcatgcggacgagtagaccttagggattttagactggggagtctttgaatcaaaagtgccactagtatctaatagaggttatgtaagattcactgaactcacaggttaatgataaaaatatggtgaagtgagaatgaagtgagagtactatagatcagatctgtagaagacgagagtaaatatgactgacagactctgtagaggtaaaccattaactagaggcttttagactacagacttattattgatgtccattgctgttcgactatatctcataactaattaactatagctcttagcttcgtcaatgaaatggaaaggtagaaggaactctttcaaaacagactacgtgtacgttcatagcttgctatcaccatgatttctccttattgcgacagagaaacacgaatgttacaaaacagaaaccccaaggattaccgatacagacaaagacaagacaagacaataagtgtcaatatctgcaaatatattcatagttccaaatctacaatccaatttccacccctgcccacccttgccctgcaagttcctgccaaatcctaaccgaaccacgaaagaacccaaaggaaaaagaaaataaaacaaaacatcaacactatcagtcgagtgatattcataacaaaccagtctttcgaaaaccgatattccgatctgtttttccagtgatggagaccctctaaaattcccagccgaagacccataaacccgcaacacgagacaccggagaagaaaagaagcaaagtaggaaacggggatgtcataggaaaataaaatgaaaaaagtagccagaagaatattcataatagaaacacgaaagtggatatcagcatggggacggaaaggtggagatagcacattcgggtgaaggtcgaatatttagccaattgctaactgccgaatattatgaggcggcatatgcacaatcatgtactgcccttgaagaccatacatgtaatacaagggccagcgggcgacacaatttccagcagagtaaagcagagcatgctatctctccagtctcacatatcactctcaacaagtgaaagtgtagatgcttgaaacggtcattcttgtacaaggtatctcccacgaaggaagttaccgttgaggaagaggatcgatgataagataggcaagagggggaatgagaaagaaatgaatcgtcccggcatagcgaatataaacagacatcaggggcaaatgggggtaagatagattgaaaaaaaaacatcaagcgaaaacacatgagaagagagcatatcacaaagcacatcaaatggggcatagagcatagaaagggatccatacacatcgctcgctagagaaaaggtccaagacatccatccataaagccgtcacgacaaaagaaaaacaaaggaaattcaatacccgcaagtcccctcagcaagctgtatggttcagtcttgtgggtgaagacaatgaaaatgggggcgactagccgtcctcatctgagggctcagcagaatccccttcgcttccatcagcgctggcgttaaccttcgttttcttagaagaattcgagccttcgccgtgagcttcacttgacttgcgcttctgcccaccattctcggttggcaatggcttgctgagatcctcgaaggtgacaggctgacccgttacctcttctcgtttctccatagcggccacttcatctgcagtcaggaaacgtccaccgggtccacgcggtcttcgcatggcgtgattgtgtcgggactcgtgcagataaggcttacgaccctttgatgtcaaacgcagctgctcctccagcatttgtcgcgctacgcgacgcttcaagattctatggaactgcttggcgtttacgtacagtggcgactcttcttggttgccgccgggtaccatgtcgggtgagggctggctttgttgtacgggagcctggggaagtggggcggcgatgggggcccggccgacgtggctcataacgggctgcgcagtctggacattggggctaccgacatgactcatgcgacgttgggaaagttgctggttttgcatctgaacctgcgatcccatcgggggcatctggttttgcatctgggggggcgatcgagggtcacggtccttcatctgcatgctcgccatgcgcggcgaggctctggaaccctggggaatctggccggccatggaatcctggtggagggggtagaattgcccagacgcagctgcagtggccatcgcagcagcctgcgtcggcgagatgccgtaaccctgacccatgggcgtggggacaccatagctttggggaaaattcatttgttggtgaacacctccgggtccattctgtgcttgttggtaatgaggttgcgacggaacgataggagaggactgatggtttgagtgagattggatgggtgcctgggcgttggagggtgaggccatcgacccaacaggaggaccggcatttggtggcccggtttggtaaggaccagggatgtgagagggagcatgtggatgttgcccgtgggcctgttgatattggggagggtattccatactggcgagtgtgatagtggatcttgtcacacgccgattgagtggatcgatctgaaagtggcgactttatatggagagcaccaatcaaaccaaaggattgctttgtggtggtagctcaaaatatgtcaaaagttgatgacgacgtctgtttggtagatgtaataaaccgatatcgcaagagcgcgcaatgagggacaagagtcaacacaggtgctggggtagacggctgatgattcgacgaatagtctgcaggctcggggagtcgcgtcagcagagcgcatcgccgagaggtcactggattggcgggtgggggtatggatccaaaagaacacaacggaaccaagcacgtacctcaaaactgcccgcgcgttctgaacaacctatataatactgtgttttcgtaacagaagctctttggtcaacctcttgtcgagaataatcccgaactgcttgtggagggttttgactcttttgtgcaagattgttacgcccactgtcgggtgtaacgtggttgggctgtgatgcagcggtgccggggggtgcctcaactatatgtcggcttgatgcgttgtcaagtcagaacagccctggcgatgggcaggttggtgtggagactacgcagtatataccaagcacggtcggcaggctacctcattcacgcaactctgagactttctctgccacgtccagcgtagattcgggcggtgctaacagcctcgacctgcgacagataaggcttgggtgttggtgtcagaatgcgcctctcaggctccacgcacgaacactatgggctagaattagcattttaacatcctagccaatgatcgcgcaaagtcaatgaccaatgcgctgtcaatacagagttcaagtggaggggatttgggaatccggggcgggttagaccggtcagggctgagaggggagacatgtatgcgttggcaaggtggatgttgagctgcagctgggagcctacctggtcgatcgggttctgcagcgcagacaaagtgacgatttgagggtatagttaaaaactggccaaagccaaggaacgaatcactttgcgcgactatatgccatgtcagatgcaactgggtacccacgagggaagatgtaaatgatagggacgcgtgcagattggacaaaaagaaacatgaaacgcgatcgcgcgcataggtaaaatgagaggagccaatgagggaatagcaaggtagaattgcagtgttttggttaagcacgcgttgttttgacacgagataaccaaaagagcgcgcaacgtgggattggagcttagcgattaccttaataggcacgacagaaaggatagaaaggataatctccgggggttaaggtgactttccaatcccaggcaatcaagggatcccagggtagaagatgatttgaccagcggaggggagaggggggagatcgagggatcgtgccaacgagagagaaggcggtggttctgtgcgtaaccggagccactgatgtcaagccgggcagttccgcaagtatacaagtaccggcagtaaagcagtcaggcagcaaggcagtcaggcagtcaggcagtacaagcgcagcgttcaagcagtacaagatgtatatagggatacaattgtagttccaggtcaaatgggcaaaacaagtaaaatgggaatacaacagaaatccaagtgaattgtgacatgtgtttacccaaggcgaattgccagatgaaagatatcggattcaaacaaagaaaagcaatagcaataaagagagcaaaaagcatacaattgcagtactgttgtggtgtagtgattgcaagcagaattgtatacgacttaccccagtttgattggtatcaccaatagagaaggaatgaccgtatgcaaggcagggtttcaccaataatgatgtaaaaaggggggagatgatactgtgcgattggaggatgaactggagagggcgggcaaccaacgagaagaggcagagggaagaaaggcgaggaaaaagggcggatggggcagttttgtaggagattgactggctgccgactgagcgaccgccttgctccccgctgctgaggtagccttttctgcggtattacgctggattacgcataattaccggttattactggtgcattcctcctgtaaccgcctaaatggcccccaatggtatcagaatgaccatactgtaataaaacaaatccggtggtcccgagctctcgtcatgtgcaacccgagactatgacgcatgtatatgttgtcgttaactatcatctcttccttacaacatacaccataatctaatctttcgttcttaatcgacttttttagctcatataaccatctactgtatagcaatttactcaggctatcctttacatcttactctactaccctcgaaacccaatcctaaccatgaatcatacctttcggctgcatctgcatgtctgcccattcgcctcattttaataatcgcctcctttcttttttggccctttttcgtcagcttgcttcggctcatgataatcaattcgaatgcctaaaacgatgcgctcaatccttctttgctttttcctattcacggtggacaccgcgtacctcggccgtgtgccctattttgggcaagtctcctccacctaatgtcccattcctctatgacccttgcttcaaagcccgtgtacaatgtacaacatagtccgaaaaaagaagagctccacagaagaggggtttgtctagtacggtctacggagtactccgtattattcacggcacttatggttctgggagtgtgatgagatctcctaggaagcggcaatcagatcatctccccgggcggcaacattgcaatccaggcggaatgacggcattaattggcacacaagaccgtccgtctggcgcgaattggaaagatctagtttagtatcatgatgtagacgttcctgaaaacacgaggtctggctctctatctactcgcttggcgcattgagatgtttgttccagccgagctcatgacgcaattcaattaaccgggttcttatctacaatataggtatagagtacctgttatgcataatatacgagactgtttctatagcgcattattggcattattattgacatccagactggcggtcgaagtaattctgctcaccgtaggtttatcttcggctcaaatatccggacctcgtgttgctgtttcggatatatgttccatgaatcgcctccgtctcaattacaacaattcaaacagagaacatcatattcttatgtacctttctatactcccgatttaatccccacgtgcattctagtcagctttagtagcgtcccatggaccattcagcacaggcgataatcccgattcgcagggacagatgggtccgatctccggaccatgaaacacccacgtgtgagaagcttgaccgcttgacttcgaacttcaacggagtttctacttctagaaaagggttgcatgggtaaattatgttcatgtagtattgataaattcctcatttcgttcgctattttggctgcttggaccgatattcgtggccttggtaccatagcaacccgcattccttgaaatatatttatgcaaccatatgtgcggagtacatgcctggcactcgagacctttcctttctgttttacgccttgcagcttttttgatcttacagtaaaattgagcacaccctgatcagattattacataagctgattaattaaccttggaaaacggcggggtgacatgttaactatatcacgtgtagccattcccatttagatcgcccatcaaaaacagactggctcagtcaaagtgaccgttcgttctagctgtcttggatatacctcagtgaaaaaccactcagtagagctatttgatcgacttaccatttttccattttagcctatgctcctgagcatagccctcggaatccttcaaatgactatatattatcggccatgtcgcgatcatcaggagtctcgcttctcatttttcagtctttatcattccgatttgatctataagtatcctcttgccctggatctgaattgtgggactatgcttctcgctgtcgtattgttcaatggccttcattcaacaaactagggatagctcgtacgttgaggtggagttgcgacatcctgacggattctctactagttaagcatcagtacgatgcctacgttggattaagcaacaccggtttcttacacatttaagtttgaaaataggctaatgttcttcagccccaaacccattaatcattcgcttactaaatccgtgttgctgctatcctgagggaaacttccgcccggtggagcccctccgttgtgagcggctgagccgcaatacatctaaccggttcggtggagagcaatatccagggtcgcggatgccatggcgtcatcgaagcaagcgtcaatacctgcttagcatagacaacgaagatatataagaactatttgctttacttacctctcccatcttcaactcttcaactcctcaaatatctccctatcacaatactgctctcgactacgtcactttcaaatatttatatattaccacactcatagagaaactatcaccatgtcagactctaccttccacaccacaactcaggacatccgcaaggccgagtccaagcttgcccagtcacacgatggcaagcccccagcaaactccgacgtctctcaaaccaaggtgagttatctgtactgaattatcaccaagcataaagcagacctctgacacaatccatatagtccatcattgaccaaaacaccaacaagcccgcggaaatcgagaagaccaaggccaacctgcctctgcccgaccaacccccggttgccagtgactttaactcccttgaccagcgtaccactaatgtgggctctgggcgtttcgagtaccctcctgataacagtggcttgcgcgagggtgcagctgctagcagcagcgcccgcattgatggaaaggagctgcacaagagcactgccccatgatttctagggttcgttatgtatgatagtcaaatttttatcaagcattatgaccaatagtttgaatattattattaccatgtgacgataatcgcggtaaaatcggccgattaatagtttacttggagagaaccatggagagaaccaatgaatagtgcaaattcagaagtggctatattttcggccgacagtgtctgaatgcgtcagctaaactacatgtgaggtcatacatgtaattaccaaattggtgttcaaattatagtaaaagttggcattcgaacatatcatttcatttcaagaacattgaacaagattagcgtagggcagacctgacaccacccagccgttgggaaaaacgacggtatgtcagccgaatggttgacgaatattccaataataacaggttaccaagtcattgtgtcaaacttccttgaaacgtcgccacattacttaaagtctggacattctagcctccacaattatagcatatttattggagcttaggactcgactgatttccgaaaacaagatgtgatatagcttttccaagttgatatagaattggggttatttcgatgtcatcatcataacgtcaacattgggtacaagagccaaggagtttgtatacaaagccgacaatgaattcttatacagagaactgtaatccttttttctctatccaactgaagtaacacaatggcctccaacactcaaaaaacttacaaactctccactggtgctcagatccctgccattggcctgggaacctggcaagatgaggcagcccaggaggcatcagtccttgtagccctccagacaggatatcgccatatcgatacggcaagatggtaagttcctcaacaatttgacacgcataactagtctgacccctatagctatggcactgaggctgctgtcggcaaagccatccagaaaagcggcataaatagaagcgagatttttgttaccagcaaactgtggaacaacaagcaccatcctgatgatgttgctcaggcactgcaggatagcttggatgatctgggtttggaatacctcgacctatttctgatgcactggccttgtgccttcaaacgaggagatgatccattcccctctgacaaagatgggaagctgataactgcagatatcgactacgttgatgtacgtgctactttaaaccaatggcaaggctatctactaacaaatcaaagacttacaaagcgatggaagatctcgtcaaatccggcaaagccaaagctatcggggtttgtaacttctctcggaaggaaatcgagcgtcttattgcgaacgcgacgatcaaaccggcggtgcaccagatggagctgcatccctggctccagcaaagtgatttctatgacttccaccgcacgcatggcattcacgtaacgcagtattcccccttcggcgaccagaatcaaatctatggtgcccaagagaaatatggtcagcttattaatgatgagaccttggtcgagatcgggaagaagtacggaaagacgtcggcccaagtcgccctaggtattttgcccctgctcgcccggttcagaaatacagagctaataacttttcatagtttggggtatcgaacatggccgttccgtcattccgaaatcaaagcatccagaacggatcagacaaaactttgatatcaatttcgaattgaaacctgaagatcttaaaaagatcagctcgatcgacaggaagctccggttcaatgactcaagcaaagacttcggttacgaactcttcactgatcttgacggaaagcagaagtgaagtaagtgtgatttagagattacggtctttggaaacactggctgaagattgcctatggaggtgtcggtgttgatgcctgaagatgcgtgaatgttgctggcagaaaatatgaattattataacagaggacatacatcctataatctcttcaaggccgtcattaatgacttaagaaatgggttctaaatgtgaagctattcgtacctacatatacaaatcgggattggggcataatagacggccaggtgtattaaaagcatcaaggatggatggtgaaggttacgtagccagtaaatcaaaatacgcaacagtacggagtacaagataacatatattgaagtccggagcatagtactttgggccagaagcaatcgattattaggtcgctggattagattcacctagttagcaaattaaccgtcatccagtatgtgatccacacattgagccaaacgtccattaagggcgggaatcggcaatattaacccttcttgggtgtgttgtccattacatagacctccggaacaatctgtttttttttgaaatcaagggtttcaaaaaggtcgcagagcttctcagtgagagtttctgagaagttccttagtcagaaaagaaccataggtaactaaagtggattcgtggagatcttactttgtcgtgtcgccttgtgtattttgatatagttctcagcttcctcgttgttcgcgtgttgcggtatatatggatatctgtaaaacgaggcgcgttagtcgtaactatcaaaccagcattagtggaaatcatacttgcgacgaatccacatggcacacaagaaaatgagagctatagttagaggaatgccgaggccaagagatagcccaagagcaagcccccggtttatagctggtggactgtcgtggaaaccattttcaacccttatagaaagggcttggtactttgcattcatcgtattgacctctgcggtgagggcatcatgaaacttgccagacagaacctcaagcgctccttcccaatgactgatttttgcaatatcctcgtcgatcttcacagaaagagcggtaatatcctcgcgcatacgactgttctctttgttaaaatcatcaaacctcctagaaagagattggaaatctgtgctcgatccatcagtttgtgaattgttgccttggtttgtccttgcattgatagtgttgatttcattttccaatctctggcaccacgaccacagcgtgagaatattgtcgtcggtcgtgtaagaggagaacaccccacccatgttgtagtagacgcgggaatcaaaaatcggcgcagaaagatgaatttagtaaagaaggaggggcaagcaccttggtgaaatcatgcataaccgtttgattgccataagagaaaacttagaagaatatgacccgggactcttcataactctatttccgtccacgtatgagcggaaggtgtttgagatattatatacgctgtggttgggtcaagcttagtacaatgaacacaacaaccactgagcaagaaggtattagcatagatacccaacatagacggaaaaatatcttccacactgtggacttctcgtggatcgtaaggatataatgtaggataccacccgcgtaacgctcataatgaggtaagacatattggtaaccatccatgatctcttgggcattcctttggccaagtacatcttctatcaatcccttcacaacgaaaataaaatggctgcaggtcgatcttacccagccgaacatcatggtaggcataggggtagtttccccgaggatatatacctcgaccaattgagacgcatcgacatcaagggaaggagcaccttccttacgtgaaagatcttgaacttgatcgttccgaacgttcaaagcatgatcctcaaccggcaaacaatctatccgaggacttactattcgaaatcgacgccaataacttcaaacacgatttactcgaccctagcgtcgaccttctttcgtttatcctcgttcgatatcgaagaaaatcttctgttgaccagaatggcaactccagggcatagcgcagcggtcgagatatttgcttccaaattgatggtgaaattggctatcatggaacgagagaccgctatccaagggttcccaggagtaacgatcacagtcggcaatagagggaaacaacatgactatggatggggcccactccaccggcctggctatggccgtaagcgatggtcgttcttgaagttgcggtgtcggagtctaaagccaagctagagcgcgacgtggagttttggttagatccggccagaggaaacgctaacatagcgttaacgctagaagccgccagaaaaaagccggtcattgacaagacattccggtttagattctccgttgatcattccgtttgagatcctgatgcgacgaccaagctcctctcggaaaccaatgttagcatcggcatgcaagacctcaagggcattgtggaagggatctgggctgcccaagatttccgaaggggcgtatatacggtgtacctatgtccaggtactccgtaccttgtcgcctccacctgtgcacatgtctgaaacgcttactcagcaccacccactccccgggcccggacacaagtggctcttccacatgttgactccgaccacaattgcattttgttttgctttgtgcctcgagaaaaccgactctgtggctggtttttctcggtggcctactgctaatcctgcaatatccaggcttccccgcgcatcaataacccccccacaaaaaagcaccacggacgcgcaacatcaacattggaccgatacatgacgtctttgttgacacctacgattgcaacctcgctacgaagcactctcaaacgatcacgaacagcctagctacagccacctccgcgataattaccctgggactgaccttcaagctgcgctcctcgcggagttcgcgcatcagtatacccctgtcaccacttgaatcctactctaggactccggcttttataaacgttcattattgacgaatacctcccgtgcatgggttagagagcaaagatggctccaggcggcggtggaaatattaaggtggtggtgcgggtgcggccgttcaacagccgaggtgagtaaatatcgagggatggattcgtttttgagcctcaagctaaccagtctgtcattgtgcagagatcgagcgaggtgcaaaatgtatcgtgtcgatgaaaggcaaccagaccgtgctcactcctccacccggcgcagaggacaaatcacggaagggtgggaaaggtgttagtgaagggaacaaggtctttgcctttgaccgatcatattggtcctttgataagaaatcatcaaacttcgccgaccagaatgacctcttcgacgatctgggttctccgcttctggacaatgcttttgggggttacaacaattgtatcttcgcgtatggccagactggttcgggaaaatcgtactccatgatgggttacggcaaagaacatggtgtgattccacggatttgccgatcgatgttcgagcgcattactgctatccaggcggacaagtctttgaattgcactgtcgaagtgtcatatctcgaaatttacaacgagcgagtacgcgacttgctcaacccgtcgaacaaaggcaacctgaaagtccgtgagcatccgtcaacgggtccttatgttgaggatctggccaaactcgtcgtcggatgtttcgaagaaatcgagagcctgatggacgagggtaacaaagcccgaacggttgccgcgaccaacatgaacgaaacctcaagtcgatcacatgcggtttttaccttgactctgacgcagaagagacacgacaaagagacttcaatggataccgagaaggtgtcgaaaatcagtttggttgatttggctggttcagaaagagctaactcgactggagccaccggcgcgcgattaaaggagggtgcggaaatcaatcgctcattgtcaacacttggtcgtgtcattgctgcactcgctgatgtctctgccggcaagactactgccggcaagaagaagaatgcatccatggtaccatatcgtgattcaattctcacatggttgctgaaggattctctgggcggaaattccatgacttccatgattgcggcaatttctcctgcagatatcaactttgacgaaactcttggtactctgcgatacgctgactcggcgaaacgaatcaagaaccatgctgttgtgaacgaagatcctaatgcacgcatgattcgcgaactaaaggaggaattagcacagctccgatcaaaacttggagggggagtagcaccgggaggagcagctggcgcaataggaggtggtgtcccgcaggagtactaccccccagataccccgttagagaaacagatggtgtctatccaacagccggatggaactgtcactcaagtcagtaaggcagagattgtagaacaactcaatcagagtgagaagctctacaaagatctcaaccagacttgggaagagaagctgcaaaatacggagcttatccacaaggagcgtgaagcagctttggaggaattaggaatcaacatcgaaaagggcttcattggaatgagcacaccaaagaaaatgccccatttggtcaacctcagcgacgatcccctacttgcagaatgtttggtctacaatatcaaacctgggactaccacggtcggccatatggatcaaggtcaaaccgtcgagattagattgaatggatccaagatccttgagaagcactgcactttcgagaatgtggacaacgttgtgaccattatacccgccgaaggcgctgctatcatggtgaacggcctgcgggttgacaagcccacacgactgaagagtggtttccgaatcatccttggcgattttcatattttccgtttcaaccatcctcaagaggctagagccgaacgggtcgagcagagcttactccgccattcagtcacaacaagccagctcgggtcgccggccccaaacaaaacccatgatcgaaatctgagcaaggcaggatctgacttggatggcgattcatctagggcggattcacccatgccccaacagcgtagtcgtgagtcagactggttcttagcacgcagagaagctatcagtgctatggttggacctgatcagatctccaatttgcctgatgatgaactggatacactgttggaagatgtgcagaaggttcgagctgaacgacgtggactgccggaagaagacgattccgactccatcagctccttcccaactagggacaagtatatgtccaacgggaccctcgacaacttttccttagatactgctataactatgccaagcacgccccgacagaatgacgacgatgaagtcaatggcgttgcatcatttaaccaaactcgacaagatatgcagcggcagttggatcgtcgcaaggaagagttccaagaaaaactcaagaccgtgggagcttcgtctgatccagaatcgccggagctacgcaccgagaaggagcgaatggaggacgctctgcggacggttaaagaggaattcgaagagcaactgcgcaaacaaaaggagtcttttgaaacccacatccgagatatgggtaagccagtacctcaaatcttcgaaaatggcttcgccaagttagatgaacgtgaacttgaaatcgcgcgttcagtatacagccactggtcccagcgaaattatgtccgaatggctgagaagattttacaacatgcctgccttctgaaggaggcacagatcatgagtcatatcatggacaagcatgtggtcttccagttcgccattgtcgaccatggccacaacatggaatcgtcctatgatctcgtgctcaacggaatctccggcgatgaagacatcctgcttgatgaggccaagaaaccctgtgtgggtgttcgagtcatcgacttcaagcagtgcgtaattcacttgtggtcaattgaaaaactccaacgccgcgtccaagccatgcggcaattgcaccaatacatcgaccgccctgactacattcaacacttcaaactcgacaatccattctctgaaccttgctcaccccagtattctcttatcggtgatgccgacatccccttaaccgctgttttcgaaactcgcgtgcaagacttctccgttgagataacctcaccatatactcagagtgtcgtcggaatcattcgtctctctctcgaaccatcctccgcgcaggcgccctcttcaaccctgaaatttaacgttgtcatgcgggacatggtcgggttcgcagagtgggaagggactgatgtacatgcgcagttatttgttccgggtatctcagaggaaggaggcgcaactacaactcaaatgatcaaaggatttgaggacggtcccgttcgatttgaaagtgtgcacagtatgagcttgccgctgtcaagtccacggacagccgcattgaaggtctgcgtttatgcagctgtgacatcggttcatctcgacaagcttcttagttgggatgatatgcgtgactcagtggagccttcaccgcaaaagcggactgctgctcggatcgcggaatcagaattttactcagaagaacgtcatgacgtctttgcgagaattcagattctcgaaatgtcagaatctggcgagtacctccccgtggaggttgtccaaagcagcagtattgatgccgggacatcccagcttcatcaaggattgcagcgccgcatctcagtcaacatcacgtacagttcaacagaaactcttccatgggatgatatcaacaacatccgcgttggttctgtccacctcctggatccttggggcaagatcccagatcaggatttccagactccagacgtccccttgaagtttgtccaagaaccaacggtcaaagaaaatgccgacggaacctctcatgtcacaattgtcggccagtgggactcgagtttacatggctctctgttgcttgaccgagtgacagcagaaaagtacagggtccaagtaactgtccgttgggatcttgtatccagtcgtttacagaacccagttgtgttcgaggcagagcaaaccattcaaatccaaggccgtacccatgtccgccaacagtcgatgttcaagcaattctggaactcgattcgtgttgtgcactcgacgacttgcatgtactccttggttattcggcctatttcagctaagcgtgctgctgatctgtggcgtatgaacacacaaaatgactatgtgaaaggcgaggagctcttgaacacctgggcgcctagaaaagtttctctggtacgagactacattgccaaccgcaaacgccggcagcggctggcagagcttcacgcagcccgaggtgctctgagcgcgggctgtctcattccatcgctggctcgtggtgggaggtcaactccgatgcggggtgcagatctcaatgagcgaaaatccaaaattctacggaagtatcttgatctgtggtcgctcaagcaggacccaacagaggcaatcctcatccggagtaataccgaacccccttcggacggagcggcacacattaaaaattcggatgccagcggcctttatgataaactttctctcaaacctcgcttcacagccaccatccaaacccttcccaaagcccccgacgccttgaaaacggggtacgtgcttacgcccgatgataccaacaacgtttgggtgcgtcgtttcttggagctccgccggccgtacctccacatctactcggtcccagagggagacgagattaacgccatcaacctccgcaatgcgcgtgtcgaccatgcgcccgacttcgcaagactactcgacggttcaggagctggatccgaccgttcgctgtctgccaagggacgaccgaatgtgttcgcagtctatggaacccagaacacgttcctcttcgccactagaaccgaggcacaaaaggtagaatggatcttgaagatagacgagagctacttcaacagcaacagccccagaccccccgccaatggcgaccattaaaattttattgcggttgccaactgttgtgcgcggacatgtccgtggacaagcttcagctttgcttcccctgcttcgtgtttcattattacgggtctaagtctacctttacctttacctcctactttattctttcgtttgcccatttcctttcatgacctgttgagataccccttgcatatatcgactcgctatggcactctcgctcttatgtacataataatcctatctggatcatatattcgattgtgcacagtttgtttcattttggaaaagatcttttatgcagtttgacctgcatttctatttggtagacaagaacgatataaatatattttgcgatcgagatagagcctactggtctacctgtgcccattacctattaaattcaatcagaatatgtctatgaaccctcagcatgtagcccacaggacacacaggaccgttgccatggaaacaatcagagcacaaatgacatcaacccacaaaataactaccaagtcttcatctcttctaggctgagaactcatatggaaattgaagcttaaacattcgaatgggcaaaagtgaaattgttcgagaaagaatgttctcccaacgcccttcattccgctacctggctatcggcgcagtggtgtctctgtttgtccttgcattccttgtcctcggcacaggtgcaccctcgctctcatcacaatttaatctaaagacacaatcacgacagcaatactgtgcacctaccgtgaactcttccgctggctgggagtttgttgttgagcgcgatggaaacaaccacggtctctctgaggaccagtgccgcattgctttcccaaagctgtttgttgagattgacaagtcatctaaagtgaaagaagataagcttgtttcctataaggagctcaattccaggacagtggatgatggtatggtacggggaataattgatcgaggagaggtgagtgaaatattgacccttgtggacttgagagcatctgattctaatatatggtattcagttatatattgtcgactacgcccccatgcctgttacagcatctcgagcacgcgccacattgaactccctccaccgcgccctgacagcattcccagaccgccacctcctacccagcgtcgagttcatcttcaccacagaagacttcgcagaagacacaaccgccccaagtcccatctgggcctactcaaagcgtgactcagacacctcagtctggctaatgcccgacttcggttactgggcttggccagaggtacagattgggccgtaccatgaagtgcgccgtcgcattgccgcaatcgacgacggccagactgccgcagatggcacatatattccgggcctgcagttccaggagaagaaaaagcagctcgtatggcgcggcagtctggcgacgaacccgcccgtccggagcaaactcctcaagtctgcgttgggacgtagttgggctagtgtgcgtgttattgactgggatgatcaaaatgatatccgctttaatcttctgcccattgaagaccactgtcggtacatgttcctcgcacacacagagggccggagcttctctgggcgtgggaagtatcttctgaactgccgttctgtggtcatctcacatgcgcttgaatggcgcgaggctcatcatgcggcgctggtatcaactggcccggatgcaaattatattgaggttgaccgggattggtctgatctatcgcccaagatcgattatctcattgataaccctgcgattgcggagcgtatcgctaataatgcggtgcgcactttccgcgatcggtaccttactcctgctgccgagtcgtgctactggcgtcagttgatccggcagtactctgcagcttgtgatttcgagccggtcttgttttcgactggccgggatggaaagactcagccccggggtgttccgtatgatacttggcttcttatgcattgatgatctttgaatcggttgctattgattgtgtttttattgcatatcggtgtttttctttttgcgatattcccggttggcgttgaccctgatacagtttcaatttgttttgtacatgagatatattgattatttatgactgaatataatgcaaactagaatgcaatttttattatatgaaaacaagtatttcctggtttatattcgggggagtctagtagtaagtatacctttgccaagccttgatgccaagacctacatgaccgcaatattcttggcacgtgctcctgcttacctacgcaatcgccaagacctcgggattcgaaataaacatccgctgatccatggatcggtcaccttgtcacgttttcggtgactttatgtcgatttctctgatgatcaaaatacggtagatgatcatgcatcttttttttttgccggattttatattgcctgatatcaagtttagcctgggctaaccccagctacacctattacagcggtgatggatttccccgcatttgcacctgtgcctgtggctgacatcttcaacattcttgtcttcattcggcgacgaactttagccgcctaaagggtctggctgtaagtctcttagcttggatcactgataaaccaaattttaggctggttgaatgatacatggatttaattgaggtgatggactaccgctaagacttggtaggaaaggaatcatggtccgtggatgattggtgcaattgtgactgctgaagtacgggataaatggctcgctggctaaattgaaccaagacattcaggatatgaaactgtttggaaacacgccccacatcctcctgtgaatataaaagctcttctcctgaagggattctctgccataaaataacatatctcaattcattcgtcttcttcaattatcaacaatatccgacccttcattatggtctctttctcaagcctctttgtggctgcttgtgctgccgtaactgcctttgcgcttcccagtgagctggaaaagcgagcgatcaccacgagcgagcaaggaactagcaatggctacttctactctttctggaccaatggaggtggcagtgtctcctataccaacggtgcttcgggccaatacagcgttagctggaccaactgcggatctttcacctctggcaaaggctgggctactggcagctctcggtaagtcgagtccacctagttttctattgtccacatacttacagtacaccatgttagaaacatcaacttttccggttctttcaatccctccggaaatgcttatctcgctgtctacgggtggaccactagccccctcgtcgaatattacatcctggaaagctatggcacctacaacccagctagcagcatgaccttcaagggaactgtgaccagcgatggatcagtctacgatatctatacacaccagcaggtgaatcagccttctatctcggggactgcgacgttcaaccagtattggtccatccgccggactaaacgcaccagcggaacagtcactactgcaaatcacttcaatgcttgggcttctcttggattgagtctcggctcgcataactaccagattgtcagcactgagggataccagagcagtggatcgtcgtccatcaccgtttcataagcgcgtgaaagccctgcagtggcttcatgcgaaatgttcacttgctttggcaaatctttattggaagggctattcgatgggcctgttaagtctcattgtagtaaggaggtggaacgatactttgcttaggggaacacggacactttattgtctttaggcttatacttgtctatatataggcactcttggttaatatgacggtgcttttagcataactaacaaggcccacaagtcggccactttgaatacttcaacttctctttactttctctttcttcttccttctgtgatatttgtaggaaagtatggcattggtattgcctttacgttcttccttccgtccttgcctacatatgtctgttgttagcacaacacgcagtctaagagaaggaaaaagaggaacatacctgtagaggaggtagacaacaagcataaaaagaacagcggtaatacaatctggaatatcggctgctgccgctgtcttccagtcagacggggggtagttgatttttgtcttcgcgaggaatcaatgtatttcttctcttccgaatatcctgtaattggctttgtcggcctcgctcaaggaggtcactgtttctctcttccgtttcttgggcacctccggtattcccgtagacactgtcctctgcgggatcgaaaataggataggcttgtcacgctggattcctaggatcgaatcgatgtccaaaatggtatcatctcctaggcatttgtttgcggtgaagtcataggactgtttcttcccgataggttcaaggtagagggtgaaattatgctttacccgtgtccccactgagagattgcgtgccgtggaccatcagtatttggcgccatcgggttgacaggctgagatcactcggccaacttgaggttttctggaaaggtagagtgagtacaagccccagggtaggcgaaaacttcggcggggaccccacaagtccccaagcttctcaccttcctatatattgaggcttactgtgcgtaagtagacgagaagagggagagttgagatgtagtctaacgaggggtgagtacttgaggcacctagatggcgtcctgagaccacaaaatccaactgacgggtgcccaatcaaagggatagagagagaaagagagaggatttttttctgcaaacaaacagagaactacttatgtagctagatgaagcttatcaaacaggacaaacatggcaggctatttaacagatactaagctctctccactttctctcttccttctcctccctgtccactctcactctgacgagttgaagcaccttttttctctctatatatatgatcaccatcgtatttaggctctatctacttctcagcctccatctacccacggtctatatgcctgccctcctcccactttctttcttcttcacggcactcgaaattcattgcacatcgtgcttctctaatgagcacattcagcggcgacgagatcggcgtttaggaaaggttctaacataacataagccagacaacaagtgccgtgttcggctcgcaaggctataacattgcatttatagactataaatgctctggaaacataaccatgacgctgtaattatggataggcaggcaactatcaattttgttagtgggtttaaggctcctggactctgatgcatgacttgacggatttgattgacaatgcctggaagaccggagttcagaattgcaatcggacgattcgcatgttatatgaaagatctcaatgtcaagtatgggttcgtttccacgtacgaaaaagccgtcttgcgcgtcttctttcatcgacaattaagcaaaaatcccagggtgccgaaccgcctatcgcaccttcccgttttgaggttcagatcttgatacgccccgattcccacatatatcaccgaaattgttcctattctaggaccataccatttagcgtcgattacagcgcatttgaatgatggactacacgactgcctggaggcagaaaggcaatgatccgcgatgcctagtcttgaattcgacggggacatgatacggaagcgatccaagttctgctttctctgatgacggaactgataattcgcccgttggacccaccactgagaactacgttcaggctacatcctcatgcgcaatggaggcggagggtatcaagcggctggcaaagcgtttgctttgcgacatgcttgggctcatcaaaagatgtgccaatcttgacgatatggaggaaatcaatcaccttcgcctcaccggaaaaatccgttggtccgaaatgttcgaaaaggaggacgggttcatctatgaatagactgggaacatgggcgaaaagctgtgtcacagagtaagcctacccaaagcgtgggaatgctggctcagccgagacggtctcggtgatggttgtgatctgggtatctctcaacacgatgagtatgagagtacctaagagcgaagttgtattcgaatctttgcttgttcccaagtggtccatcattggtttttctctggtgcttgcggattgttatgttgagtgtagccgccttggaaccaacctctataattcagtctttcatgtattcaatccaaattgactcgtactcgtacaagtagcctcggttgtctctttctagttggttctagtgcttggtgcttatatttgaatgtgataatggcaaacctacttgaaatatatatcatatccatcagagaccatcacgtacgtacataaaacatcatttagaagatactatgctctatgaacatgctctagtcagctcttcgcgcttcacaacaataatatgagaatatatataatgtcgaacttacaaattcttgtattatttttatatcccctttaagggcctcttgcgatgcactaggcacattattcaacccccgtgccctttgacctccacttatgtacacaccttgtgcgcacattacataatttatattcccaagatcgtgtagtgacaacggagactcattccagctggctatgtccgaccggtgttctccgcgcgtggaatggtttcgatcatggaagttgggcgtgacaccggaggagctagaaggggactgcttgctgtctggcttggtagatatgatagatcggaatggaggtagggatccgacgatgatagctgtcttgattggtattaggattctatagtagatgtcgagcggccaacttacagattgacgattcaaccacactccatactgcaagtgctgcttggtccgaatatgcttttccggtgatagcaaccgctcggataattgccgctgcgataactatgatcccaagacagaacactatccctaacccgatcttttgttgcatattgatctttccatgccagatgattcgaagagggagtgacatgactgtttaatggtattaaatcaagaattgacacgaaagtagatggggtctttgtactcaacaagtccgtaaggatatcgactgcggtgctatatgatatggagataacagatcctctctgatcaattggctttgagcatttccctaccaattgttagacatagaggctgaaggttttaagaaacgggttgtctaccgaacttgaagtaattagatggcgggtgacaagtgtacaccgacccaatccaacatccgatatatgccaaggctgcgaacacaacggtggcccaccagacccgccggtaccgaggcaacccattggatatcatccagaagagtgctaggaatgaggcttttacgctccatagcacggaccagaatattccaatgatcgcaaactcgtagtgggtgtagcgaagtccgtggtcgacaatatctggcccggtcatattgaacactatataatagatgtgtggagcctgcagagtctgtaatactgcgttcgttatcaaaaaagccaaggcaagcagcatgaaatagtcatccgctagtagacgcttcacatacacgattcggatcgcgatacgagcagacgtaaacaggatgcttactcctgttcccgtccaagtgatagcaatgaggccggtcattgagagttcagttcccatcccttggggagtgggaagaatctccatagtcatgacgcagcactgtatgtagactttttgcctagtaagtgacaacagacaggacgctcaaattcgattcatggcgaataggtcatgagggggtaagctcataaggtaatctttccactcatttgtttgtgcacaagctagctgggaaggactgtgataggctacaattacttggtttgtaatttaccgttgcgcaaaagaaaagaccagggaaccctgccaatggtgaaatcgacccaaagagggggtaaaacgagggtaacacagattagatgaaacgaattatgtcgagtctgcatggtaatcctccgtataactgcacccatgatgttagtaggacaccccgaataccccgagaaactatttataaccctcacttttggatgaatcgagattttgcctgtgaatgaaggtgattgcttgtttattgggtcatcagtggcccagggcggcgacatccaaagcgctgagatatgcagcccggatttaaattgagcgacctctcaacccctgtcgttgtattcgaaattttcgttttgtccattagaaaagagactccacaaacagagtgactctgcagcgtttttttttttttcgctattagactttttaggaatcctagaataggtgttatacctgataggccgttcctcgagccctttaagttagccgccgacaattgagacctatatccgtgatctgaaagttgttgtgattgtccagcttttttgataatcacaaaaagtacacctaagatgactcgacgcagggaaactcgcgtttgtcatgcaggttaccgggtagccttccacatgacaccccaggaaaatgttcctgtatggttagaaagagatcatgtctaccgtagataccttcctaagtccaacatccaagtctacttttttagcaagtctagcgatggtaccaaagctaatctcgttgttgcaattcgctggtttaacgtatgcggcctttcaggcttcatgcaaatgcgtaagcgaaaaacaacacgaaaaacatcgacttagattaactcactatctagaccccaggagatccatgttggccctcattgagaatatgggaatccctcaatacaacagtatctggaaagctggtccgcaatctctcagtcgctatctcatgttaccccggcacctacgaagacgaggatgaatgcgcgtatgtgtattcgcaatggtcgaattccactttccaacaactttcccccgtcggttactttggtcctacagaagatgcttgccctccgattgacatgcgccatcaatcacctcgcacatgtacgcttggtccagctccagtgtataccatcaatgcaacagagcctgaggaggtagtagctggtatcaaattcgcacaggagaatcatgttcgcctcgtcattaggaatacagggcacgatatgttggggaagttagtaacacacgatgattcaacaaaggtactattctgactaatcacttcgttgtagatctgaaggctatggaggactacagatttggatcaagtacattcgaaagggaatatctttccaacaaaggtatactccatcgaatggatgtaggagaagcaattgggctggctctgcaatcattattggcggaggctatgtttggcgagatgtatacaaagttgcctttcagcgcaatctcacggttgttggcgggggagacccggttggtgaaattcttcccccaacaaaaagcaaagttctgattttgttccaaagaccgttggttgcattggaggttacacacagggtggaggacactcgccagccagtcatgactacgggcttgccgcagaccaagtactagaggcccaagttgtattggcaaatggcgatatcgtcacagcgaatccttgtcagttttcggatctgtactacgctattcgaggtggaggtggtggtacttacggcgtcgtcacgtcgatggctgtcaaagtatatcccagcaagcctgttgtcgcacagtcgctcgaaatcactccactcgccaacgacacggactcactcttagacgcgattaccgatatctaccagcaatatcccaatatcatggatgcaggattctccggctatggatcctggtctattaacagccctatgatgaaccaaacacctggctatatgcatgttgttgcggccatgaacaagtcccttgtccagtctttggaagttttcgatacacttttccagacattgcagaagtataacggtacactccttcgtatatcagttatatggtatgagttcccaacgtatggggcatacttccactccctctctggtatatcccagccagtgagggctgggtctcccaactcggctatgacatcacagatgtttagcaaagctgccttgacgactagtcgcccttcacttcgcaacatgattggtgtcactgcgggaaattctgaagagtgtgcattggctaatgttgagctcgtcgggggtggaaaggttctcactggagcatctgacaagtactccagtgtgaatcctgcctggcgatctacctatattgtcagcgtcgtggctagatcttgggtgaattactcatctgctcaaactgtcgaacatgatatcactcatatcaagggagctgctatgagagcgctcgatccattccttggaagctacatgaacgaggcatgaatattcttcttttgcggcgaattaacaactttactgactgtaagaaaggctgatcgcaatgatcccctatgggcgacggatttctatggtacaaactacgtgttgttagcgcgaatcaagaaaaagtacgatccgacgagtctattctactgccagacctgtgtgggtagctcatcttgggctcagcgatatcttgatggagcaaattacggccctctttgttccactgggctgtgatgcttgatattgaatgagacggcattaaaaatccgcttgaaaccttgccactgtctgatcagcatagtcacttttaatagtctagcggcaatagacatcgaggttaccatggatatgttcttgaacatagggataatctccatatttcccttaaatgacaccaagtcagtccagtaccgtttgcctaatgagtgctatggagctgtatggattttgtaagaaacgactccatagatcgttggtaccttccaggtcacttccagtttgctatttgcttccttcctttgttcatttatttgttctttcctttccagggttgtttgcactcgagctaagcgagacgttcgagttttgcatcgtttgcaataaaaccagctatataaacaggccgattcccacttctgtacttacttcttctctctcttcatcatattggatgaacccaaccacatcccacatcccacatcgtgttcatcatccatcacatgacttgtctgttcttactttcatccttcagccaacccaaccacattgtccttctatcttctaccttctaccttcttccatcatccatcatccaccatctatcgtccatcttccactttatgaggtttgtttctcatctgtgttatcacctactcttcatcatccatcatcgtggtctataatacctgatgacatggggctgactgtactagatatgtgtgctcacatccactcatccacttcatgcatccacttcaatcaaccatcgacattcggcattcgactactgcgatgcttcgaccttaaaagaggaggaatgaaaagaaacggtcttgaacgacagagtctccgcaggagtgtctctgaaggagacttctcgtcgggaagaggttacagcgtgtacccatttaaaggagactctcaagaccgtttgctgtggtggtataaaaaaatggtcgcctcgacaagcatgcatcgacatccaagaaccacatccaagaaccacttcaatccatccacttcaatccatccacttcatccatccacttcatccatccacttcatccatccacttcaatcaaccatcgacattcggcattcgactactgcgatgcttcgaccttaaaagaggaggaatgaaaagaaacggtcttgaacgacagagtctccgcaggagtgtctctgaaggagacttctcgtcgggaagaggttacagcgtgtacccaattaaaggagactctcaagaccgtttgctgtggtggtgaaagtatggtcgcctcgacaagcaaacattcacattcaagtgtcgatttccaaattccacttcaaccatttacttcaatcaaccacattcaatcgaccacgttcaaacatctacttcaagcaaccacattcaatcaaccacattcaatcaaccacattcaatcaaccacattcaatcgaccacgttcaaacatctacttcaagcatctacttcaatcaactacttcaaacaaccaatttcaatcaaccacgttcaatccttcaatgaaccatatccaagctccacttcaatcaactatccaaattccacttcaaccatattcaaacatccacttcaagcatctatttcaatcaaccacattcaatcagcccaattcaagcagcaacttctatcaaccacttcaagatcctacattcaaagcatccgcattcaaacttcagtcaaccacttctatcattcacattcagccttactgtgatgggtttcggcttcaggaccatttgcaggcttgcaacaacagcaaagacgaaaggaaaagagaaaagaaaagaaaaccaaaagaaaacatctcgaatgatttcaatcagctacttcaggatcctgtatcccaacaaccacttcaatcaacaatccacattcaaccatctacaatgcttcgacctttaagaagaggaatgaaaagaaacggacttgaacgataacagtctccgaaggagtgtctctgaaggcaacttctcgtcggggagagggtacagtgtgtacccatccaaagcttcagggcaattggcaggcttgcaacaacaatacaaaaacagaaaagaaagaagaaagaaaatacctcgaatgatttcaatcaactgcttcaagatcctgcatcctaaaaaccacttcaatcagaaatcaacattaaaccatatctacaatgcttcgaccttgaagaggagaatgaaaaggaacggtcttgaaccacaagagtctcggaaggagtgtctctgaaggagacttctcgtccggaagaggttacagcatgttcatttaaaggagactttcaattgattcatttattgattctacctgagtttaattcttagctgtggtttatgcctatagaaaagactatgtatatatgctacacaataggctgctacaaggaatgttacgaatggagccattatctcttggcttcagttcctcagaatgttactcttcgaaaaaaaccgtagatccgatctccagatattattatggcctagtttagactgtccgacgtctcgtgtccaccggaatgagggagtcatgtgggaaattccacgccatgcttagacgaagcaactgaactcccaatatttttctttctccacccgaaggagtttagtgcagatagcagattacagcgaacagcatcaaaatcgccctggaatgaagcgaatgtaactaaaataccaggaccttctccgtaggaccggagaattgtggatttcaagggtgttgcgtaaagccctcgctcttgcaagaaaggatcggcggacgcgcggtgttgttgggcatggtccgtgccctctacgcctgaggcatcaatataaacttgatcccaccgccgaggccgaccttcagatcgatctttcgtatctccaacaacaattattgagtgaaccatacaaaacccacaacgatcaagatgacctcagcacctagagatgcactggagtttccagattcagataggggcttcttagagcctcatctacctcctcgggatggctcggcacctgagtctgatctccccttcacaacactcacattcgcgacctcgcttgacgcttctctagctctgtcccctggtgcacgtacagttctttctggaccccaatccaaggcaatgactcattatctgcgatctcgccatgacggaattatcattggcgttggtacagcagtggcagacgatcccggtctcaactgtcgaatcacaggagttgggggttatggcaagcccggcctagatggccagcctagaccagttgtgattgatccgacagcccgatgggacttttcagacgacagcaagctgttccaactttgcagagaggggcgtggccttgcaccatggatcatcaccgcagttgagaaaccaaacgccaagaaacaagcattactggaaaaatacggcggaagatttatcccagtcaaaatgcttagaacccacaccggccgacatcaggttgactggccagatttgctcgtcaccttgaaatcgaacggtctcaacagcgtgatggtagagggtggtggccaggtcatcaaatcccttttgtgcccgctttacatgtctttgctggacagcgtcattgttactattgctcccacgtggttgggtgaaggtggcgtggtcgtctcccctgataggcgctttgacgaggatggaaatgcgatctccgcagcgagattgaagaatgtcaaatggtacccatttggggaagatgtcgttctttgtgggcagatcaagctctatgactgagagagaacatcttggatctttttaccttttaaaattgatcaaccctcaagtgcatgttccttcgatctgaggattccagcccagacttcgatatgttttgtctcgtggccttactgtggcaacttgtcaataaaacattacactatttcatctgctaggtcatgtttcccactccaccggcgtacagtttatcccaaactttccgttgaccccatttgtccaccacgagccaattggaaggcctgtacgtatgtatcaaaaatatgtcatgtcgtgcgttttgtccctaggcattgagggaagacttccgtatgaagaataaggaacatacttctactttactgtgggaatccacttgggaacaccggatcaaatatcttcaaatcaacactcaacgctagtcgcagcattatatattgaggactatcgtagttgcttgaactcaattcgaataatatttctgacataacagaagacattaaaaatagccttgtgtcattcatttctttctttatctgcaataatggtctttgttttcggaggatttaattctgaactaataggaaccaaaaacaattaaatagccccgatgtccacatcatcgggactccatcagggcggacctcttgatcagtgctcggagcctggaattcatcgaccatctctaggtactaaccattagatatacagacatttccgggctctacagacaatgccgccactaaacgatagtgaacagcacgagcgtatgctcactgctctccggcgaggaattcacgatctgcgctccaagccagagaatcgcatgctggtaattgaacggttgaacgcaatttctcgtctggcacgcatctgtgtacaggtcgggaaggacgctcgtttcacccggctttgtgacacccttcagagagaaatgccacgccaaatcgctttgctcaagagtgatataaatagtaatcttatagttgcaaatgcgctcgcccaaatgatccttgaatcgtccacgtttactcgctctatcgttgtttttaatagcgaggatgagaccgacgagcaaagtgagttggatcccagcgatgataactatattgcacgattgcttcttggttcgaaatgggctaaagaggtagttgaccttccggaagagccatataagatgcctgaggtgtttggaagcgctcgtgaagatgaagctgagatggatcccagccatgatgaccatattgcgcgcctgctgcttggtccgagctgggctactccgatagctgattttgctgaggagccatacaaggggaagaaggcggcgggtaagtgattgtagatttgttaggtcgcgcgaatggtcttctctataacagttcttacttgaatcgatgtttgttctagatgaagtagaggacactttgtattgtgggctggaaatatgaagaatatcatacaaatcctaaattacatagtttctagatagtatagagtggtgagatcgttttttatcattcagagcaacgcattggtgttttttaatctctgtaagccaagggaaaagatgggccggtactatctttcctgctagatgttctatcaatatccggccgagtcatctcacggtgaataatgttggtcaactcctcttgttcactgggcgacgtcactgtgtctcgtctttccaaagcagcccttcgttcatcctcgctgtccgatgttccgcttctttcggcatgacgtgacgcttgccgtctgacccgttgagcctcttccttctcaaggattgcagccgtcacccgctccttgcaagccttttcttcgatttcctgttcaatgcacgcgtaatgcgcccttctataaacaccgattgagctggacgtgatgccaagaatctcgtaaacgaagagaataggcagcgcgaaatagagttgggggttgcagccagaagaccatatgtcgatgagtacctggaagacggaatgtgctggcagggcaaagcccagtttgtagaaagcaggtgccagctcaaatgggagaagaatggaagtgacattcgagacaaccctcgatatcagcgccatcggcacgtagggaggcggaagccagatggtgaaagtgtctagcacgaggaaattcacatgtgcaaaaagccataatgccagccaattgagtgcgaactggtttccattaacactccagccacttttgaatgcccagattgcaccggcggtacatatggacccgacaagtgtgtaaattgaagagatgactaggcgcgcaatagcgatgcgatgggctgacagcgaggtgtagagtttgaattgaacgtataaaccattgatagtaccaagaaagaagaactcttggattacgatcaagatgataactagggtgttgtagacaacccttgacccttgttctgtgggttgaatattgttgtcggccaatgtccaaggatcgtagaacgctgcaatcgcagcaggatcggagctgttgacactctgcagagactgtttcccgttggtttgcgagtacgccaaacgtgcagtttccgataatactttcatgctatctgcaaggacggtgtcaatcaccgttgggtagcgcgcttcattccacaccatggtgagaacattgttcttatcatacgaagatgcagctgctccacctgcgagtgcggcacttaatgcgttggacgcatttgctgtcgtgtataatgctccccagtatttgatgtcacagactgcaccttcaatcgagccgggctgggggtacgctgaggcagatcgctcaacaagggttggaaagctgggtcctttgaggctttgaaacgcagcgcgggccgcgtcgcttatcgcaccaccgtcgtagtctacaaacaaaacattaatgttatgaatgtgtgaagactgctggaaaagggatccgaataggtaacagaatagaccgaggaatagaatttggagcagaagcagattgatagcagatgcctttagcaagccgaatcgacgcggccgaacagatgggtggtggatgctaggccgctgctctcgcgctctgggatagaactgcatgtaacccggtggagcgatagctttataccagatgagggcgatgatatgaatgtcagactatagatgtaagaagtctgtgatgagcctttcgacctccgaagcaacgagtcccggtcaaaaacaggtatcaagtcccgaagcccggaggggattgtaagtgggtcggcagagtttaaaaggccgaaaggctttcggaaagatagggtgagacgaattattttgaactcatagccctacgaggtgtagagtcaacatctacctcaagattctgtgtcaagattctatgacgacatatcctgataaaggggaaacaagtcaggccacttgatcgaaggttccaaggcagaggcggaaggattctcgggccccacagtgattaacgtcgactccacttccttattatgtaatccggacttggcgaccgttttgggaaggatcccagcctgaataaccaggccgaagatcttatctctttggcccgggaaatggccttcaactgtcctctaccgatatcaatcccaatccggtccgttttttatcatcttaataacaccagcatattaaatcatgatggtcaacttccggaaatcaccggtggaacctttcttcgctgtcttgcggtgttgcaccactccttggtgatcacctctccgcgtgtatgactccggttctgtgatttttgtgaatatctcaccctaccggtaatgtcgagttacagtccggattgagagcagaatggaggtgataatggtacttccgggggaggtgaaaacccacagctgaatggcactactcggtgatgatgagcaagatatcgactcctttttgtctttagctgattggaagggtattcccaagctcgatgctccttttaaaggaatgggacaagtttatttgatgctacacgcgcaggatgcgagagcaaaatatcactaatacgctaggttattccttagttattgccacgaatcttcaaatctctctatactcaaccacaatgaacgcttcctcaacaagccagatataaatctcaacaccaatcaacattttacccaatctccgtctattggtctcacaaatgcagagtcatattgaataattaatgttgaataatcgatgttgagtaatcaatgttgaataatcaaaatattcctcggcaggccaatttctgatattcccaggcggccctcgctttagccgcctcgaatgggcttcaaatactgctttaggacgatagaaacctcggcataggttttaagaaggattattgagaagtaatctacctcggaatactcgccaattaacgattaccctatcgttgcattcgatccttcctcataagagagcgtcgtaacgatatgtacctctctgcttcttatctgtttaccttccaaggatattgtcaaaatggtgcaacttgatgacggcctggaggctgctacacacggtaccattgatgttttacagtcatcatccgacgatacgctcgacctggcattcgtcaatactgcagaaaagcctaaaagtgtaattattctctacaaggcatcctagtccgtggaactcaatcttattgtgtcccagtatccaaaataccccttttcaaaaaaatcaaccctcaaaatgttgaaggttgagtctgggctccactaagaaatccacccgaacctaatgagcttaaaatccgttgggagagtataactcaacctatcccctaatatgaataatcataaaataatgtcgtcgatataaagagcaaagtctcaatcctgatctaggtgtattatcttcacggtctatcataatacagtcctattccgattatggctgctcctaaaataaccttatatttcgacattggcagtccctttgcctggattgcgttccatgctttgaaagtcagtcgaacatctcgaaggacttaatgaatgagaaagctaatgattgtcgatagacgtcccctgtctttgcaaaatgtgacattgaatatgttcccgtctccgtgcgaggactgttccagttgtgcaagaacacgccccctttggctgtcaagagtaggtttctcttctttcttctatctctaacgctatgtactacggattctatatttatatgctaatctcccattgtagacaaggcccaatggttgaatcaagaacgcatttactgggctcgtcgcttccatgttcccatgtccgaagcgctcccagaagcatttccagcgtccacttcggaggtccagcttgctctatgccttgtggctaaacaatgccccgataagattatccccatcatggataagatctatcgtggcttctgggaagagggtgacgcgaatgtcctcactcagcccggtttctctcctatctttgaaagtgaacttgggcccgaaaacgctaagcggatcatggatgaggtgcgtttttttctggctcaaatgactcgtatttcttctctaatattgttcaacagttcaaaagtaccgagacaaaagacattttggatgaaaacacacaacaggtcgtcaactccggcggctttggtttgccttggtttgattgcatagatgcacaggggtcaaaggaaagcttctggggaattgatcatttgggacgtcttgtggattttttgcaactagatgcaaacctagacaagtctttccgcgtcttactctagcacgacgtgttgaagcttagtcctggtcactaccgacccttcacaaccctttagatagacgtcagattgacctaccagccgcatttgatttgaaataacatttcctagattatcagtctcaatatctggtagataggcggctaactcatatgtatatgaatagtaatattactacgacaagaaagacccaggaactgaaattaatttgtagaatactcgatatattgagaagttaatgataagccttcacgagtcggctccttcgtggattggggtacctcggaagaagatcctcaagggaggagcagctggctcggctttacactttacgccggcgactcgaggtggcagctccgcaaagagctcgcgtgtcgcacccgagacagattcattctttgtgatctcctgcaaatatcgtagcacgatctaccactttccatgggcaatagcagaatgcttgctcttagcagtaacgctgtcaaaccaaagcttgacctttgtggcaagattcacccaaagatctagaacaagttagcctataaaagttcaggagtaagtgacttacttcgaaggtaaaactttccggctgggtctgtcctttcaatgtccaggaactcggcaataaatcggaagcagaaagtgaaatcttccccgctaaatccattatagaagtagctgcaagggcctcctcttcggtaatctggagacagcatcgtgtctaagaattatacaaagaaagaaatataccataccagatatatatgttcttttggaggtgagagatagatgaagaaggttagattctacaatgatcgagatctagctaaatagctaggtgaagccaggcatcggcatgtgatcggtacgtggccaccacaacaattttgattctctcttattatgtggtaaattcccacctagcattctctgaggaagtaacggataatttgagatactgaatgctgaatatatttgaggtgttgatgtatgtaccctccttcctaattaggccggcacctacccgaaaacttattccgccataccgccctccacaccgtttgagattttatgccgctctagatagttacctgcaatttatatgtaagccactaacaaaatcaggtcacttttgtcatatcaactgcttcatcaagaactgcttcatcgtcaaggggttaaatcctatagggatcaagtagaatgtactaatttctctgatcaaaaaaggaatgttttttacggccagaatatatggcaaaatccatggtcgcacccaatctggaaggtcgtactccgtactgaaatttgaggcaggggggtaaatctaacaacaccttatatttactcgatactatactatcgtccaagtttatatgcgaactatgtgttcagtagagggggtaaagtcattattttactcacttggtgacgcgatcccgcattgaatggcaacatgtcgttcaatcaaggaccggccctagctaagtcctatttggtctgaaccatgttacgcagtcttgtcggtcttcctaagcgatctatttgcattagcactatctttcgtgaacccctccatctaaccggatttgcccttgccatgctgatcctgcacatactaagcatttgattcatcatcacaggcgcaaatgtcaccttataaacatacaattccttcggattttccccgcggcactactgcacaatgccagatagcgtcggattgacattcgctacgagcattgcgcaatcttaggtgtagggcacgagtgacaatatatatcttgtaaggaaagactcaaatccatattgtggaagttgtcaaccagactcaaaattgataatgtcaagcaaaagcttatcatcgcttgattcaaagcagccgatagtccaacagacgccggttccgaccacaaagaatgctgtaaaaagtggagttttggctgcgggtggttcagtcgagttctatgaacccatcgcggagtacgaaggaaaacatcgatatgatccacttgccgaatggacggagaaggaagagcagctgctcgttagaagggtaatgaagacctttcctaggattcctatactatggaccaccgactaacatttgacatgacagctcgactacagaatctgttcttgggtctgtctgatgttcttcgcacttcagctggatcgtggtaatatcggacaagcattatccgacggaatgcttgatgacctcgggctatcaactaaccagtacaactacggcatgaccatattctatctttgcttcctgtgcgcagaggtgccgtctcaaatgatctccaaaaagcttggccccgacgtatggattcccattcagatggttctttggagtgtagtggggatttgccagggcctagtcagcggcgagcacagcttctatgctactcgagcacttctcggtctgatagaaggtggctttattcctgacgcacttctttacctatcctacttctatacaaataatgagctacccatgcgaatcgccttcttttactgttgttccagcggtactgctatcgtcgcggcgtttttggcatttggaattctgcacatgcgatccatcggcggctgggaaggctggaggtggctgtttgtgctcgagggtgctgttaccttcactattggtgtcatctcctggttttatctacctccaagtccgacgcaaacagcaagctggtttcgagggaaagatggttggttctcagagagggaggaagttatcatggtcaatcgagtcctacgagatgatccggcaaaggtacgtataaagggatttcttttcgaagttcatccatacacatactgactgtgattataacagggtggcatgcataatcgtcaaggtctgacactgaaacttttgcgggacgctctcatggactacgatctttggccaatgtatttgatcagtctcacgctgctggttcctattaatcctgaatcagcatatgtgaccctatttttaaggtcacttggctttgatacattcaaggtcaatctcctgaccattcctgcgaccgtgttattcctgatccaactcatcttttggtcttgggtgtctgaaaagatcaacaaccgcatggtcattttactattttattccttttgggttttccctcttctgatggcactagagctgatgccggtgactgcaagtccttggagttggtacgcagttacagttctggtcattggttctccatatgtccattctatcaatggttagtactaatatcttctcacaacatctcaaattccgaatcctctgaccccgttcttcttatagtcagcttgatctcgcggaacgccggttctgtgcgcactcgcactgtgggtagtgcagtatataacatgctttgtcaaacaggctctatcatttcttcaaacgtatgttttgtgataccccgggatatccttttatatcgttggttggttttatgcctaacatatcttctttttcagatctaccgaacggatgataaaccctactaccgaaagggaaacaagatccttctggctcttgtcggatggaacgttttggtcaccatcttcattaagctctactatatgcggaggaacaaaaaacgtgagcagctttggaatgctatgagtccagatcagaaacagcattacttgagaacaacgaaagatgagggcaacaaaaagttggacttccgatttgcccactagctcctagtgagggcggatgatggtgggtgcatgttacaaatttgcatttgcacttgacggtttcaaaaatattcgagatgaatatacaattatcttttttacacataatgttaaattcaggcgttatggagcgctttatacggattcagcggtcttatccgctaccttgatgagaatgattgcagtgaatatagaacctgaacaacaaatggagtttttccaaggcacaagagcatatgaatactttctacccttgattcaaaattccccatgattttccatgattctgatgttgaggtttggactacaataacgaacagtgcaaacatgctaattatgtgcataattgtgctgattaaatctatgacgccaagaccgagatttatgcacaaactgtaggcttccttcgacccaacttggtaagagcacaccgatccatcctctcccctattctttcttgtcggtttattatctcccccgacacactgtcatgcactggcgcaaggctctagagagaatgacatatctccctatctagtcataccgtgctcgctttgacatctccgtgaaaacccggtctcagtgttgtcaccgttattatccctgtcaactccaacgccgatcataggaagtagtcggcgcaaggcccccgtgacatcatatcctaagtggaaagtcctcaccgactggttaggccttcactgtcatctcagccgccataatgcggggtaatcgacaatggaacaagctcgatgttggacttttctaatgaggaaggttattcttcgatccgatatcgatggggcagtcttgaagtagtaaaagatcggtcgatcggacgatcggacgtcctttgcgaaggacttcacgtcgctaatgttatagttgcttctatgttcttttgttaagtcctgcatgctaaagtactgttctctatactattatctgctctaagttctggtgtctgaagactagaagctgagatcatacagatggactgtagtgtacgactagcgccatgtgtctggcccctgatgaccacgagtgccaacacatgaaagccatgcgcctcgtgtgacccaacttcaccctgggccctatttcccgggcctatcatcgtggagaaacagacattggctaggggtaaattgttggagatatcatatctgggctgcatatttccggattatttcttggcttcgggtcgctttctgtttccacaatctatcgaattttctctcccttgcatcatgttactactgtcggagctttgacccttgatcgacgattatatacccctagtccgaagttccttgccgcatctggccgagcttggcggtttgatccgcacattctattccctagtcacccctagccacccgccccgtgggagatcttccggcctaatctatacgttgtatcatggctctaaagcacagctgaacttagactggcttcaatggtagaattagaaattgtatgcggtcatactgacaaatttaatcatctcaagtccagcaacgtggagtcaagtcgcagggcattcacccagtcatcttgcagttatctagggatacccggtccttctcagaatcagaattctagactcgaatcaaataatggccctcggccgaataaacccaatctcatttgtgccctcgccaaccaacatcctctatggcaagggatttgaggatatctccaaggttcttgttgaagtatcaaggtgctttatcttcccttcttttgttacccttccctttcaaagtcccctagtgatctagcgagtccttcatttgcaacccgtcaaacgcaccttttagctttcaagtattccataacgtagcccaataatagggttccaaaaatataaaatataaaaaaacgccagcacaacctcgcacataattggatggaccaaactacatttctccgagtcccgatgccacctgatggatctccatatcaggcgttgcggctgtggctttcattgtttaatctccttcccactgctcggagttaatatgcccctcggggccaagcagacgcccagcatgtggccttacttcaggtgtcttggtaccctaaatccaatgccgactctgttcccctacattcggacaatgtcggtcaaatatacatataaggacttagctcccctcctccgattgatgatcagcaacttggatcttcgagacctctatcttctgataattcgtccaatatgcggtctttcatgaaatccacttccacatggggtctactaaccctatcccttcttccggctgtcctgagctcgcctctattcgaaaagcgaatcaagggcccctggctgggcctgaacaccaacttcccggatcccagcttcatgaaggcggccgacaacaaatggtatgcattcggcaccaacggtaacggcaagcgggtccaagttgccgtttcaaatgacttccaaacatggacactcctcgatgtcgaagccctccccacaatatcaacatgggaaactgagagcgatcactgggcacctgacgtagtgatgcgagtaagttttctcggcttctaaaaagattaaccctaaaaattaactatctccaaggacgacggaaagtacgttatgtattactccggtgaagcaaaatcagatctcagacaccattgcgtcggcacagccgtagcagaccacccagaaggaccctacgtcccaagcaacacgcccctatcctgccgcctggatcagggtggctcaatcgacccagcagggttcaaagacaaagacggcagtcgctacgtcgttttcaaagtcgacggcaacagcatcggccacggcggaaactgcaacaacggcgtcgaaccgcttgtttccacgccgatcctgctgcagaaggttggcgccgacggtgtcacgcctatcggggacgcggtgcagatcctcgatcgcagtactgctgatggtgatggcccgctggtcgaggcaccgaatctgattctccatgggaatacgtactttttgttttattccactcattgctttaccgacccggcgtatgatgtgcgctatgctacggcgcagagcattacgggtccttatactaagaccaatgttccgatgattaatgctgcgaatacggggcttatttcgcctggtggggggaatgtttgtgggtgcggggatcggatgttgttccatgggttctgtactgaggagaagacgagtaggtgtatgtatgtcgctgatgtgactattgatgggaagacggcgtcgattgcttgagagattttgtttgcattttgcagttggtccggtttcatctggactgtggctttggttgatatataccccgggttttgagggcttgcatgtgatatgtggtgacagcaatgatatactgtttcgcgatttcaaacttgaatacttttcgcatataagtagagaacaactgctcttcgccacaaggaactgtagaatcacaattatgaaaagcacgtacacaaatgtagtagaattaaattatttttttatatcgtcgtatcgtcctaggcccgcctgcatgcaccccagatttattcgtccttttcctctccctcagcttcttacttttcatcttcctttgcctcgtcctctagctgtacttcactgacacgcctcttatcccgtacctcttgcacccactccgctgcaccctgaatcgctacctcgggtgtctccttgtggttgagaagatatccttggatctccgcagcggtaagctcaccactcggaacaacagcagcaaactcagacgccaagtcagtgatacgagatcgaggatctttttctttggccgttttcactcccccattactcttgtcggagttttggataatctcgctctctaccttggcgatgttaccaacaataggagttgatggcaacttgactagcccattgataccattgatgtgggttcttggcgctgcgatatgggcaatgtcgttattcatagccccgtaaatcgagataaaaagctccttgatatctgcttcgcttgtgtacccgaagctgatcttcatgtccacacgcccgggacggagaagagccgggtccagcctgtcgatgtggtttgtagtcataatgaggatacggccttcactggcggcaacaccatcaatcacgttcagaagtccggagagcgtgattccgcccttcttcttcgtgtcgtctttggcagctgtgccatccgcttccacgccagattccttgataacaagatccacggggttatccgaagtagatgtaggcgcagattttgcggcccgagcctttgtaatgcctgctgagtcgatatcttcaagtaggataatgcatcggcgtggtagttccgagaacaataacgacagactctcctcttccaaggccgtggaattcagatccaacaggtagagcttcaatccaagcagtccggccgctgcaaagcacagactcgtcttgccagtccctgggggaccgtgtaaaaggtatccacgccgatatgggattccacggttgttgtaccagcggcgcgtgcgagggtgcaggtattctttgatatcatcaaggaagtcatgcttctgttcttgatcgagaataacggtagaaagaggacgcgctaaccgggccatacaccgatgccagctgaaggcttggccggcggaaatccgcgagccgcggtagattaccgtgcggttcctgtcgcgctcaacataggcctgttgtgcctccgctagcagcgacttcaagatcgcaggattccgaccgagacacgatatgaatatccgctcgttgttcattacataccacaaacccccgtctcggtgttcgcgctcgagcatgagcggtcggttcttgtaccagaagtagtggcagccttccgcgggagtaaattgcatcttcttgtacttgtcccgggtggtgaccctggcccagtatgaatcgaaagaatcgttcttctcgccatcgacagtctcaccctcggcttcttcttctctgtcgagctcctcttcatctgttatactctcgctccagtaactattggttttgatgcctgcgacgaatcgatttgtatttctcatatgcggctgacgtgagatccagaacatcagataatggaatgcctcatcgtcgaggcgaatttcggctcttgacacaaacagctcattgaagttcgcccaaatggcgaatacaaagtatcgagcagttgcgccaaagacagcaaggctgaccaggagttgcaggtaagagctgacatcaaaattaaggtaagataccaacatgcgcgatataaagccatagccggggactagaacctccaacatggccgagtccgtcttggacaaaggccccgttgtggggatagtttggctggaattcatgatcgatagatctgaaatgctcgagtttatttcgcttggatttgctggtaatagagtaggaggaaagacaagataggaccctgcatagcaaaatcaaagcataggccagtcttttatggcccggggaacatatttgagcctcgtgtgttggcctttcccgctcagacacacatatgccctcggccgagcctgagatgtgcctgacacgcctcaattcgcgaacatgcccatgcagcattggtcggagttgattggattggacaggatgggattcagttgggctggttgtgggcgtctgcctggactttgactcattcttgctgcacgtcgctgcggtacaatttcctacgtcatatcgcataattagaccgaagggtaacatttatttatacgccacgttcgtatcgagttaattttgagaagataaaagtgaaaagcgggagcaaaagaaaatgatttttgccggcaagtgttgtgttagaagtaaacggcagacattgttatgctttaaataaacattggacccttggcctagtctaggctccagtggcaaaacacaaatcacattgcccgagcctcgccgttagtgtctcactttatctcgcatcgcgcacttctgcctgaagaaacgttggggctttttgtttttcttgctgaaaatatggccatcataagtcagcctaaatgcgtcagttctatgcgtaatagaagctcccatccattgttcaatgtaagcttaatgaaacaagtctaaaccgaaaaaaaaaaaaagaaatctctccctcggggaatcgaaccccggtctcccgcgcttatcggttttaatgacaagcggaaatcatcaccactagaccaaggaagaatgcgatggccgagttactgctcggccacttggctggttgatggaaacagtaccccaccggggccccatacgggagtttagaataacctcaatactaaaacatccaatcttctacttgatatcactctattctcgtaacaagttaaaacatatttacatagtcccaagggagggagatatgtttgccacatatttgataaaattatctgaacataacggattagtagcacgatgaataatgggactttgattgcctaggttgaagtttaggcacagtcagtataaatctatcacagagtatactacttccttcacttcatcctccacctctatctactattacttcctgaaccactgatctggcccaatagtcgcttaactactccatctctatctccatctatatcttccctttgttcatagccgaacccctgtaagccgtttatccccagatcatcaataaaaccagctggaatctaaagaatcctaacaatggaaacagactgcccagaatgtccttgggccaggatgcccctcagctgactcctatttcaaaggctccaaagcgcagcttccaagaaatgttcgacgaaagttgctgcatagttgacccaaatgattgtggaactgatggaattgacttcaccgagaagctccctgataccaccaccttcctgtctacacctcagccaacggacaaactagtggaaacccacaagaaactgaaaagactggctgagcttatcggagaaggcaagagccttgccatccacactaactacgcaaaggctccccaaaaagagcgaaaccccatcgacgaggcaaagaaaagaatgcggtcaatcgagattgagcagtacaatgcctgggtcgctggtgccgtcatgcccactgtcgattggaaaaatagtaacaaaacagttgaacttcccaaagctgaaaagtctcacttcaagcatcaagttcatgccattcgagagatctaccctaattcgcacatcactcgcaagaacgcacactggttcatagctaactttcgctatgtgatgcctcttattgaagcagtcgcgatggtacggcgtgtgcggtgggagtatgtctgcgaccaagaaggccccagccggatagatctggcagatcaagaactcaccgaaatggagctggcggaattggaaacagctcgcagtatcatccggatcaccattaatacccttcagaaaagacaacgccggttgcaattggatgctactctgagggagaaacatttaagcttagaaacggtgatggaactcactggtgcagattgtgaggttattcagaaacgtgtcgacaggatccatgagagcgctgtgcgagacaaggggacgaagtgttccaagactaaggaatagccggatgtcagtgtacgtctagggattgggtctgttgctcatgtgtcctctcgctggctttctgtccacctgctctatgtctctgtgattatctgttgatgaaaaaaccccaagaatgaaatgttttaatgctagtctactactccagttccaaataatcaaaacgtcgtcgcttctactctcgctcaattccttaaagagctgcggcctggtcctgatgttattctagtctcgcgatcttgttatctttaaaagaggatccgacacaaaccgcatacctctaatggcctacagttttacactgaaggaaagtaaagattatgagtcttcaattctgctcgcaactacactgcccaggactttgaagctcattctgtgttgtcctttgtgaagagccatccattctgggcatcatatgatcgagttcaaagcacaaaattgaagccgataggaaattgtgaagcagagagtgagggcacagaataaaggaacgacgtgtgttggtgtaaaacatgaggagagggtcggggacgtagaggaaggttgaatgggagaagcacaggacatgatcgtcttgtgaagagagacttcagacaagacaattcaacctctcgcacttctaaacccctcagtattcttcttgcgattggatggcatccccgcggtcctggatgacctcacaggccatgcgaattttggccgccagtcggtccactcgccgttgttcctcgctcacgcgctgttgttcatcggcgagggttttcatagcaacagtgacaatactgcgtgttgtattcagttccacaagctccatttcggcttcggtgcggttgatttgatcgtccacatacttctgctgcgaagcctgcaccttcataactgcattgatgagaggcatcgcccatggaaagttggcgatgaactgagatgtggcgtgtgggctgatctgcaggttgcggcaaatttctctggcagcatgcaggaactgaacagcgcgattactgtcttctaggccatatggaatcataggaagcccctgggctttggcccactcgacagtggggacgatatcaccacgaatgtaggcttcgtactgttcgatctcgagggcggtcatcgttgccttggcatcggtgatagcatcacgctgaggcgttgcattctttgtgtgaatagcaaggcttttgcctcttctaacaatggaagctagtctttccactttgtcgcatgtttccaccagtgaatccgctggcttgggtgtagacagaaaactggccgtggcagggagagtctcggtgtagtcaatgccgcgattgcttcgattgtttttgtcgagcatttcttcgaacctgcgcttccgagccatggtactcggtatgatctgtgtgggcccgatctaacgactctctgatcaatttggcttttatcgtcagcattgcgaatgattgttgatgaattgagaacccgtgacccttatcgcagcttactcacaggggctgggtcccatggaacaaaatcctagaagttagctattaatatggagcgaagattgatatggagataaagatgaggttgagtacataccgatcggtgggaggagtggcgtgtgatggaagaaaggaaagagatgaagaatgaagtgaaggttgataactgccaccacgaatgtttgcattggctctgcaaaagatcgtgttatttgttgtaactaagttctcaatagcctaccgcccaatctctctgagccccagactgtgaggaatccttgtcgggcttggataaagtaagcttataattcaaaaagatactaccaccataacaaatgtgaggtttgtgtatcatatggaagattagaccgctagctaggaatggaactacttggtacaaatatatgttggtcgagatcatttgtatttttgaagagcggtttgagtgctttctttcgccattctttttgaacgacttcacaacatccttgatctcttccgggcgttgaagtatcatacgcacggtctcctcaacaggctgaacaacggggtttcaatagttctcaagacgtcaccaatcactatggagagggtctcacatcgggatcaactcctagtcagaaattgccaaactaggtatgcacttctgagctgagaaggaacccattctcggtagagtagaggcgagaatctccaatctcgctaatgggtcgagtattggtcatgtactagaccagttgccaccgtatctccgttcctatagcatgctgacggggaatatatgctttagcctcaaggccaaggaaagactcgcacgacccggcaattgcatggcaaccatctcttcgagagcatgcaacgcctcgtgaatgctatgagacaagtagacgatatagcttccccgcaagagcagtttataggtgctggatatatggatcgaggtagtccgcggccggggggaatctcaccgggcaatcctctcagagcttgtgaatcgctcttcggagtatagttatgtacccgcagtggtccaaggccccatgccaaataggcattgctgtaatgaacgagatggattcccgtttgagaatagaaaggaactggtactgacgcaggcagatggtcttgagacggtgccctcatcgcggataaaccaacgaaaggcctctagcgccaagcctttcgcctgcaaagtatcgatattcgccaaagatcacgaggtaccaaggctcgagccaccattctagctgtaacaaccaggaggggaaaacaccggacaagacatgtaaaaatatatatgcgaagacgaagttctaatatcgaaagacgaatttaagctatatatagtccccgacattgataattgtataaataagagtccaaccacagttatatccacaattgagtgcacgatgcactatattaagttgtaccagggccagataggaggaaaaatctggcagagttgatgtatgtaggtaagctcatgcactatgtgtctaacgaaacaagaagtgatcaacagaggtgagttagattgataagaataatctgagacttgtcagctctctaaatagcttgatggagacaacgagagaaaggcccgaaagccatcaatgagacaaggagaggcctgggaagctgtatgaaagtaggaaaagccttagtgcgtacgcctgattgcattaagagtctacgtagaagcatataacaacaaagccaatcacttttatagcaaacaaaatttcgcaaaattatccgcctatcatggcgacgcctgtgtggaacaaatcatgaacctgactctcctctaaggaccgttgagattatttctgctgaggttgtaaggacctactccctgccttgtttgatcttccttcttctctttctcttatatactgagagaatgagtataatttaaacattatatacgtgaacatgggtatctatcaaaatgtaaagctaaacgcacataattgaacaatcaactgtcagattccgggtgtttgccttgaacagcatcggcaacgccaccagcccagttcttaaaatcatcgagtttgtgccagactgtgccccaccacgtcgaacccttctcatcgtcactttggtagtctgtggcgggtggtgcattggctgctgtagtgggtctcggtgctggccgtggtggcttgcgttgtggaggtgatggctgcggatatgcaggttgcgaaggccctgctgttggtgaagtttgagccgggggatcaggtggtgtgtccaaaaccggtgcgttctcatccgagtgaaggccgactggcttcagcgggagtcgtagtgtgccattgcctggaaggggattgacacccaaagagtcacagacaatgttatatacctcgatgttttctatacagattcgttaggtcaaattccaatcgatggttcggagcaggtacttacgaaaaacatccaatcggctgtttggcttatgagggaaggctgggccgcgcgcaataaatattgcacgcatcaatggatgctcgtggtcgtacccgtgaatacctcgaggatggtattccttcccagtcttcaaagcctccttgacatcgaactctgaccgatcaacgagagcccatcccgccttagggatgacccacaatggcgcaatgcgttcgttgtttgagaagtgataccgttcaggcattgtctcccgtgtgtaaaattcaaaagcatgctcgtaatccggagccaccttctccaattgtttgcgaagggtctccagatcctcaggattcttggcgcgcagaccaccagatggccacccgtcaatatgttcaatcagatcataatcaatcaaatcgtccaactgaaccagcctttccgtagaggtagtagccatgccgtggtctgagacaaccatgatgtttaccacgtcggtgagattgcgttgctcaagaccagtcataatgctcgcaaccatgctatccgctgctgaaatggtctttcggatttcagtgctattagggccaaatttatgcccatctcggtcaacgtcaggaacgtaagctacgatcaactgcggccgctcaggtgttatctgcgattcgtcctcaacacccggtagatccaaaaacccaaggacccgatccgccttgcgcgacaagagttccgtcccgttatatttgtccaaaaagctcggctccctgtcaccaatgtgcgcctcagaccccggccacatatggatcgcggtcttcacgcgctgcttttctgcggtcacccagagcggttccgccatccaccacttgggttgcatgctgacagtgggatgggtatagtagaagtcttcctttatcttcgggtcccaaaatgtgtttcctacaatgccatgactctcgggatatagtccagtcataagcgtgaagtgatttgggaaggtgacgctcgggaagctcgggttcatatattgcggggaaacgccattggcgatgagtgagttcagcgcaggagtcaggccacggtcgagaaagtcggcccggaaaccgtcgagcgagataatgatagtggttggcgcaaagagagctgtgccgttggagagcaagcgtggagggtgtgctcgtgaagcccggaacccactagaggctttatacgcgccgaggaagaggatgacgaagagtatagcgatgagagtagttataaacagtattcttcgccatgaaggccgtggaggctaaggagcgaatgtgttagcaagaacatagaaaccagccatggtacgtcttacaggttcatatctgtattcgcctgtcctgtccaaatctaacgatgatgcactcaaaacagaggcattctcgtcaccaattccctcttccatctcatacatcagctcgccgtcttcactgactctctcccgccgtgaccccctccgccgtcgccgctcctttttcgtcttcccgatcttcacagtgctaccatttgggctgaatatcctccgcagaccatgtccagtgccacgccggatcagaagattctctagctcctcttcatcttctagcactgcccggtcgtgctctgcaatttccaaggtgctgcggtgctgatcgaggagcgcgtcatcgtcggaatctgagtcctgctcggagggtgaccgcaacgaagatgcatcgttgtcgtaattggcaggagaaagaagggaagaagtagggtctgggcggcgcattgctagcctggtgaagacatggaaaaagagttgagaggagaaagggagattattgccaagacccggcaatcagttgcgataagcccgatctatggcgttgtttattttggttattttgacaattacatgactagaataagatagttttaactaaaaaattgaggacgactaagcttgctacgtcaggttagattaataatcctttgttgttcacgggttgtgtacctgcttattacggctcataatccgatcaaggtagtcgagatacccaagcagcagtcggggaaactgctgggcgattgtgaaagcccatttcaaatgtgagatatgtccatagtgcttagaggagccctacttcatatagttccagcaaaccaatgcttgaggagatattccgattcggatacggaattactaaatcccggatatcaattccttgaaagattccacctcgcaaactgcaaatgatgagacaagagccaatattaccacgaagctccaacatcgcaacaaagttgggtcatacggagtactctgtcttgtacaatcaccagatccccatctctacgcctccgatgtgactgcctgcagtgatttttgtagaaagtaaagctcgtaagtgactagcatactggggctattctctatacttgaagcccaaagctgtcaaaccccattaatcactatatgtctacctagctataactatattgtattgaattgatatcgattactatggactctgttgacgatatcccctgattgatttgccattgatttacgagatactggaaacacctcccccctccatagacaccgtacccctatcagatccaatcaatacggtcgccaagcctcagctcatctgcatgttgcaatgtccctgggagggttgtgcgcaagattgccctcgtctaattgacgggcacccaacatactcggttaagaggggatcttgagagcggacctttttttagggatcagtcggaggccttcttcttatacctaatctacaccattctttcattttgcacaaacttctttacttccgaccgattagttaaacgaaagtcatggagtcaatgaattggcagaccgacatcaagcatggtgattcgttgcctccgatcaactggacagctctcttcgattatgctctcaaacttagaggcaaccagcgcatggaagttttatccactcgatcttgccatattcccccatcataccacatgggcggagttcacctggtgagagtcctcgaatttgaggacggcatgaagtgggttgcacgcatcccattaggccagtgcaccagcgacaccaagaaacgcttgcttcatgaagtccacatactttctttgcttcgtgagcgaacggagatccctgtcccgaaagtgttcggttatgagacaaatgggaatataatcggccgtgccttcatgatcatggaattgatacctggcagtactgcgatggatgcttttggaggctgggaagtgcgcaatggtgaaataccagctagattcaaatcagcgttctgccgcagtattgcagaaatacaggtaagcgtctggaatactcgcctacggtgagacgtcgactgactaacagattgccatgtctgaaattcgatttcctaagattggtatgattatgagacatgccggtggttcatacgatgtcgactcaatacctggtataggaggccccttcgaaaccgcagctgaatattttgccgcatggagcaacaccgtcaagtttccaatgcgagacatcaatatcagatcccgtttgccaagtcattggcatgatgaagtgcctgcatcaatcggaggttttcctgataaaatcaaagaagccctacatatattatccgtcaaaaacgaaggccctttccccctctttcacccagactttcgacatagtaatgttatcatcgacggtgattataacattctgtcggttattgattgggaacatgcgggcacggtcccgtggggggtcgtcgattttccactgttcttgggtgttgtaccttccccaatggatttaccaacaaattatgatgctgagggaaaccccgttggcgaagagacacggaagatacggagggaaaggaacgattatgtgcaaagtgttagagatttcgaggagagaggctctgacaacagcctttctactattttggcctcgccatatattcagaatattgcgactgccctgaggctatacgagaatgggaaacttgggctttactgtaaactgttcgatgagctctagttagctatcaccctttttgtagacaccgcacccctgtcaaacccaatcaatacgctaaagttgtctctgggctatgcaagtttctgtcaggctgtacgcctaataaagatccctaaaagagaaatatatatcagcttgcatatgtcatctgaggaatatccatgtcagttactccgtacattgtcgatctgtgaggggctcgtcacatgacatgtatattgacataaggattatgtaagatactgttgggacagcggttttagtacatactacgggacagtctaacctaattaggagaggtcgctcttagcactccattttcaattatttagagatcacctgatctgtcaaacatgaagctattcagagatcacctggctaatttatctggtctgtcaataacatgaagctattcaattaatctgctcaattggtctcattaattggtttgctcaatagacattattatgaagctattaagagatcgcctaattaatcatctcatccgtcaagatcactaaatcagttcaactgctaccgatgatatagctaatttagttccgaaaccggcatttgcaaaaatggatagtttaggttgcaagttatccatggattttacctacttttatgttaccaataaccgggatcaactttgttgcttgaagcgtgaggctgaaatacatagccctaaaaaaacacacattccactgctactgcggggaatcacattcctcaaattgatcgcaaatgacaaagatcggacatgacgaacttgacgtgaaagctgcttagttgaccgaagacagagaagcatgaaaatgtaaatgaccgatacttaagcatctcgaagtcaaattcctgatgttaggtgagctgcgttgatgtagactcactagatgccggacagccggatgcagttgttaggagactggctgggcgatcagctctgcgcaggtcacagccttgctaactttgatgttccgagaactgccaaagtcctataatgccatgatagaagtaacacggcagttaatccccaaatacggttgttacgaccagttctataggctatgtgtgctctaccagacataaagtacgtaccacctgccttacagctagagaagtagtgatccttgtgatatcactacgcagagagtcatgggtagatgaccgctactttatgggctcatcttcctagggggataagatgctcttcaccccattgtcttccaagactccacttcttcagacaatgtcttcagtgtatggtcccgaaaacaggtgacccataaatagaatcaacttgtctcttattgtctcatctctgaagtggatcactgtggaattccacgttggagtgttcgacgtgtgatgtccgcttgcgagcggctacttcccaattgggataccatatcacgtgacccacctaagccagcgagatccccacatttcggacgaacagcaacgggggaagatcatgacggagttggtgtcggcctcgtccgattgtatcagatcaaagtggattgagtctatctagaacagtgcgattatccccggatgcggaattcgccttgatctcgttttcgatgccaagacaagaggaacataaccttggaatttttttcctccaattactgatgccatcactaattaaccttaattacttagatgccggattgggaaccgttgcaagatctataaagatgccgtcctcttcacggattctgctatgtccatctcaatcgcatctcaccttaagtaagtactcgagcaccatgatctcaagaatatgtactaatgcccgtcctagctatatcgcttgttaaagaacaggccttatctcattccttgatccaaatcgtgtttgttttccaataaaaatgcacttcacagccccctccgtcgccttgctggctctcgcagccggtgttcaggccggctccaaacagctgcagggacctcccgtccacgtgaagggtatcatcggcaagcaacgtgttgagcctggtactgatgttgctcctaccggtgctcagactggtactcatcccattggaaccggcattgtcggcaccggtaccagcactggtagccaccccatcgtgactggcaccccaggcggtcccggcggcggtgttggtaataacagcactatcattgtcactggtacatccccctgctacacctgccacggtagcgcgaccatcccagtctatgttcctaccagaactcagggcacctccccatccggtggtgctggttctggcactggctcaggctctggcactggctcaggctctggaactggctcaggctctggatctggctccggttctagctctggccctggctctggttctggatctggatctggctccggctctggatctggctccggttctagctctggccctggctctggttctggatctggctctggctccggctctggatctggccctggctctggttctggatctggatctggctcaggctctggatctggctccggttctagctctggccctggctctggttctggatctggatctggctcaggctctggatctggctccggttctagctctggccctggctctggttctggatctggatctggctcaggctctggatctggctccggttctagctctggccctggctctggttctggatctggatctggctccggctctggatctggctccggttctagctctggccctggctctggttctggatctggctctggctccggctctggctccggctcaggctctggctccggctccggctctggtatcgaaggctctggctctggctccggctcaggctctggctccgactccgggtctggtatcgaaggctctggctctggctctggctctggctctgtcggttctggtggcgtcaacggctctggctccacctctggcgccggcaaaggtgccagtccctccagccctgtctctacctctggctccgacagcacgaacgattacagcctctccagccctggctccaaggttaccgctccccagatcggagtcgttagcgctgttattggcagcatggtctacggtaccattatgctgcttgcataaacgtcttaatgttcaaatggctgtctcttaatgttggtgattggttattctaattactgggtgtatttttgtctttttcgatatctgtctgggaactgccttctggttagagatatgattagattagaaggcgggaggagtactggggtgtctagggaggcgttggaggatatgatttttggtttttggtttttttgtgtttagcaatgagttatttggtaatataccagaacctaatatgattataattctaattcaaaagaatgtttacggttattacttctcgaacttgtctgtctacgtgaacgtataaagatgaactcgaatatattccatcaacacaaacataatgtatttcatcaccagagcataaaaaactaaggctcctgtctaaggcctagggccatatcccagcctgacaccaaaagccaagcctacagctcaaagtataatcccaagtggcaaaagaacagccctggtcatacatctcgtacatctgataaaagcccagaacgcagtttagtcgtccctgcagggtcgaatggcacgattctcggccgtatggctttgttttagggtttacgtttactttaaaggttcgcgtgtaaatatccacagatggacggagattggcttgatcaaggtttcagattggcttttatgtaactgctttgtgtgtgtgtgatccatggtttgaacaaccctgtaccctgtaaggctactttcgagattacgagataacaatagattgtgcggtgattgtaccgtagatttgccgggtcaaagagattataaatttagaccatgattcatgattttgaatttgaaaattgcattatgacttatgattttgaattttaaactggccagacacacctatatataaacacttttacaagtcgagtctcatctttcgcaagaaatgaacagaaagccacccaagcaccatcagaatcagtgcaacgtacaccaacaaggataaagaaaagtaaggcctccaaatcgaacggtcgccgtctcgtctctacacactcgaaatccaattcacccactgacacccacaccccccatcaccaccatcaacaccgccgtacacctcagtcgtagcattcttcgtctcatcaagacccttgaatagtcccgcagccggattaacaaggttgccgccgatagagcggtcctcgagctgcagctgcacggcagtgatattgtaatgcccgtcgttttctagcgggtagcagtataccattttctttttctcggctccgccgtgccggtccacggttatggttaccgggtatggaaatgagcctggccgggagaagtctgttgcggaggaagaagatgtaggggtgttagtggatgttgatgtcggtgctgcggaggaggtggcagtgctatttgctgtgctgttggattgtgggaggagttggcggccgattttatctggttgcgtccagacttggacgaggaaccgcgtttgggaccatgtgcatcggtagcgtgcgtcggcttttgtgctcccgccgtttgtgtccgcggctgaggatttcgtttgagaggttaggaatatggatttgtcgaagtagctgtaaaagccgtagtgctcggttgcgagaccgcggttgtagaggcggattggctgggatgaagggagtgggtacagcattgctgcggatggggttccgtctgcgttttcttccggtgccgggattatcgatgagatgttcgggtatgcggtgccgttggtgctgtctgagcggcggaatatgcttgccgaggagagggagactggtgagaggagggacatgtagaagggggtttcttcgccggcgtagggtgcggcattgttgtctgtgtattggccgaggaagctctgctctgcatcgcttggggctgccggggatgaattgaagaggttatcactcctaacacgtatattcgagctaaccgtggtactgttatcgtatgtgccattgcggaagcggatggaaacacggaaatttggctggttcgcattatacggctcattggcattctgctggcctttgggcaaagcacaactccacatcgaggagggagtgatgcaggtcgatctttcaagctgtggctgcgtcccagcgagtgttgcaatgccagtcggcatgggcggatagcctgttaggttcagccactgtgattgaacgggagtatcggctcctttccttgttagggtgatcgatagaacagtagctaagatcacgataatgaagaagaaaacgcagatcaggaaataccatctccgtcgagtacgaccctcgcgccctggacgtcccgttttcttgctgaatggaccccggccacgccagaaaccacagacccttcggccggtggcttcttccttttccagtctgcggcgtcgagtctcatggggtcctatggcgccgcttgggttgacgctcgtaattccagctgcaggatcttgattgtagcttggctgcgtatcatagcgatggggtagagcagcttctcgaggatattgcgtgtatgcaggagccggtgcctccatatccgacattggtatcgagccaggtccgcccgcggcgcgctggaaaccgggagagataggctcagaagcatgtaaaggtcgttgaggggcgagttcagatccttcagataatcctcgttctgcttgcggctcgtcagacacatgctggcgatcctgagccgaggacgcctggcgtcgaacagtaggctgggtttgtggtacaggcggtacaggcggtgcattcgagtgagggtgtgcgcttgcactaaatggccacccagacccagattgccgtccttggataacaagtggccctcgaggctggtttgcataaccataagttgcctgtcgtgtctggggaggagtttgtccatttgaaacctgagatccccgagaagttccttgtgtaacagaaggttctcgtggctgtccttgtccatatgcccattcaaaatcagaagcttgttgatgggtagatggcggttgaacctgcggttgctcttgcggtcctcgttgtccccatggccattctgacctcggtgttgcgacttgagggggtggctggaccatcgggtcctcgattcctcgcgacatttcctgcggctgcggctgtggctgttgcaatatcggctccattggtgcagcctgcggtgcgaagatcggcacatattgcactgctggttgcacaggctgtatctgaggctgcggtgcaggcgaagtataatgaatattagtaacagggggtgagatgttagtgattatctgcggagaaggagcgggagttggctcaggcataggaagaggggcaggagggggagcggaagctggctcaggaacaggagccggcgcagaagcctgcgcagggccaggtgcaagagctggctcaggcataggaataggaatcggagcgggagccggcgccgggggcggggccggaccccgccccctgnnnnnnnnnnnnnnnnnnnnnnnnnnnnnnnnnnnnnnnnnnnnnnnnnnnnnnnnnnnnnnnnnnnnnnnnnnnnnnnnnnnnnnnnnnnnnnnnnnnnnnnnnnnnnnnnnnnnnnnnataggaataggaagcggagggggagccggcgcaggtgcaggtgcaggcgccggctcctggacctgtctgtcagtcacctctacaggcgctgcaacaggatccgcaacaggcacaggaacaggatcaggatgcgaagcaccacactgacaccgagacccagaaacaccatccctagcactatttgccgccacagaccccttctcatccccatcctcatcaacaacagacgaatcccacgaattcgaactgaactccgacgccggcgacaacacctgcacctccttcgcgcgaaccgcgtacccagccggaatcgtcgacgtccgcgaacgaggcgagtcaatatcaataagcaggcctgtgttcttcgtcgatgtcgtcgacggaactggagtctggtttccgcgcgtcccttcaagatcagctccgggctccccatctgcaaacgcaagttctcgactaccatcttcagccccgtttgtagcacccgctggcatcgaacccgggtttgcgggcgttatcgagcacacgtggttgacgcatgcgaagtacggcgttttgctgaatagctcgtgtgcgcaggcttggtagtactcggcggcttcgccttggattgtttggttgttgctgaacatgaaggacatggtgttgtgtctggttgagacgtttgagacgtatgcgggtggtggggattgatggcgttcgggggcttgagtttgagcttgagcttggtattgatattgctctggttcgaaggatcgggatatctcgaatgccttttccccggtcggtgcggcggtttctggtgtatctggtgagaaacaggagatttctttctcgcgccggatccattctttcgggcctgggcgggttgtggttgttgttgttgatggggttgagggtgagtcttgtgggaaagatgggctgagtggggattttatggaccggcctagaagaggcgagaggagatatgtccaccagccttgtgaatagggtctgttttcgtctgcttgggtgttgacgctgagacggccttgttggtgctttgggggcgggcgtactgtttctggtgtccggggtggactggcatcttcccagattgaggctgttgacagggcgcgcgcgttccgatctacgcctagtgtattgtggtatccggtctctgggataggggttttggtagcagctgagtgctgggcggggatggctggcacgggtggcacgtctgcttcatattgccagagacggggtgtgggctgtgagtagatgcttgatgttgctcttggtcggagcatctcggtgctcgagtttgagtgtgcgttccaaggtgcatctcctctcgctggcgtgacgataatcgagggtgtgagcggcgtgcctgcaccgtcgtgctcttgtgatctttccaccgactcgctgcgaggcacagtgagtccgatcatgacatggcggtctgagggtgagattacatgctgctgtctatcgtggaacgtatcttcatctttggcagcaaggaacgttccagtttcattatggctgttctgactctgcaccgtctcagataaccgctgaaagccccgtgaagtcctcttcttaaagatctcccttgacttctgagccgagcgttccttctcccgcactttggaaagcagcttgaggtcattcagatcgacaaagggcgcagccgcatttgtatccggaatcgactgtttcctcggcgccggcgccaagctgaaatccgtaaccagattcaagccgagtggtttcccgacgcttttgcgcttcttagtgatgcggatattcagtctcgagctttcgcggacggaaacggacgagcgattcccatctttagcgctcctcgcctcgagcttttgtcgcgttgccttggatagaaatgtaaagggtcggtctccttcttcctgatcttcggaggagcctgagggacttaggatttcttcgctgatcggcgatgatagtgggaagtttggtactgggacctggaggtctggttttcgtttgaacatagttcagtagacttgactgtgtcatgttagttgcagaaatgagaggactcaggtgtacataccatgtgtcaggaaagcatgaaaggacgaaagtgtagaaagacaaacaaagagggtgtctattaatatgatagcaaataaaacaatggaggcaacaatacacaatagcgctgaatagagtcgattgagtcagatgtagaacaaaagaacgacaaagaaataggaaagcccgagatttaaatcttcaaggtctatttctgcatcatcacagtgcagaagagcccagcccgatcacttacagcacagctcgagctataaacaacccagccaatgatcatcggcgctggggaatttctgcagcgatcccagacatcccgctgcaggtagctccgtgctgcatctttgaggtccgtcattggacggctggcagagagatcaccaggggaagaggaaatgaagggcatggattggacgagatgtcagactgaggccagtcactacgcgccgagccgggggcgggcgcttcgagaggccaattagtggaaggacagaaatagatctccagttagattaattgtaatacatacgatttgaagtctgaaacatgttttcgtgctactgttcatattccaaggatggatgtcatattccacgtatagatgcttttgaatagacatggatatccatattccagccattccagctattcaatgttcgtattccatatcccctatcttccatgcagagtggcctcatagaaaaaaaaaaaaagcaaagcaaagcaattgcgggtatgaataacaaaatatgaggaaaaaagagaccactccatgagatccaggaaaaaatcagtataaaccaaccccgaagtcgccagtcgaatggggatcgcatctatagagggatatatgataccaagagaaagtcagaaacgaagtcgttgatgataggttttgcgtgactagtcatatctcatacacagcttgagctttcctcgcacctcacgccacctgccgtcgctaccgtcgctcatactcaatgccctgcataggcgcactggagccgttcataagaggcggtagcgtacgcggctgctcctgggtcacggcattgccgaacccgttgtaggggccctggccattgacctgggagttcatttggtggtggtcgaacatggggcgggggacgccgttggcttgctggagctgagcgcgcatctcatctatctcggactgcataacggcccggtcgcgctgcgattgcgcgacggttttctccagcattgctatgtaatcaattgcccgtgtgagcgtctcccatttgctggatttgttggtttgcccgggcggtagacgcagccggagcgcttcgaagcagtctttcatctcgcttcgccgtttgcgctcggctagtttgtgcgttacgcgcagttcgggcgtacggctgtacggtgtgctgccgggcggaccgtcttcttcgccgatcaactctcttactgccttgtgttggagggagtggtggtggtgtacattttggggtaggtctggagattgttagtattgcgcgtgcaggatgtcttgcgcaggttcttaccgtgttgacctcgtggcatccgttccgagtacatgctattcatagactccgccatacttcccttccgggaaaacgcagggttggattctcccttcgagctgacagagcttgagcgcgccacggccgggtccgggaaggcatatgccatacccgccgtgggtgcttcagcattgtaaatctccgaccgaggattcgaggaaatggccggagcagtgcgaccggctgcaaaactccgctgctggtcggttgcgcgagggcctagcggagagagtggctggttccctcctgagtaccgaggtccccggtatgaattcatgtcggtcggaatccctcgctccctttgtagacttgaaacgatggatgattgggaggcattggtgctgtggtagggcgaggccgggttgattgccagagaactgatcccttggttcatgcgactgtcgacactgctgcgccgagactcaatggtctcggccacgctcactcgttgggagggagcttcatagttctggttgattgaagggagggtggaattcggctggccgaagttgggagagggttgttgagtgccggcggaggaaggggtggtggattgatcgtggggataaggggagcggtcgacagccggatgtccgcgattcggagagggttgcgacgcggagataaagctgagggagggatagttgttgccggtgccattggtcgctgtagagtaggtagacgatcctacatggtcagcaccgcgccgctcccattccgtactgggcgagggtttcctacttgtgctttgcggcattgaccaattcccggagtcacgctcaattgtgttcagcgaaccattcccgggggatttctcggcgggggccccggtccctggcatatttgcggtgagggttgagatagatgggagagtttgcgtggagcctgcagtcgactgaggccctgagactgcctcccatgggcgatgtgcgacagcaggatccatggcgggagaggcacgatcaggcggggggggggagtgaagaagaatcgaatatcaacccgctctttttcttccacactatcgcatattccaaatcgagagagacgagattgaattcgagaaacgattcaccgtgaaaccgttgtcaaagtttccaggttcgcgcgaggtaaaaggaaggctagatcggaggttagacctgagcggtccctgcaacgccgatcaagcttaccgtgggacggaggagtgaggtattaggatatagagtatatatagtattatgcagtcaaggccgagtcgagagagtgaagtagagggaggtgagtcgagggaaagattaaagaagtagaaaattggagactcgaaagccgaaagcctcgacggtctgaaactcttttttttcttttttaaccttctttttggcatcccctttacgcaagatgaaattaaatagcacggaaatgaaatcgaaaggaaaaagacggaaataaaagaaataaaagaaaagaaatgcaaagaatgcgagtactggtattaccgccaaggccctactgcaactgtgtgtgccacgaggctgaccctggggagtaaggactaggctatacttggcttgttattgtattagcacttgagttagattatattactgttattaaccctaactactctcttatacatactcaaatatagttacattcctgaatagattcctggaaaaagcaaggagaaacacgtttacacggagtcttaacgtcatttagcaatagaatataaaacataaaatagagtagaaaatagaacaaaacacaaaacacaaaacacaatatacagactagaatatagaatactattacaataccttcacgtggtcccttgcagtctcctacttattgcccagtcaagctgcattcgcgaccggggctcactgcacacacccgggagattagtactgtaaggtcagtctgtataaacaaaccatgttgacgttggacacatggcagaggatgcagggttgatcggcagtctcgggggcgaatagttacgtttctactttttctactttttctacttctgtttggcgattggaacaaagtactaaagttgtctagtacgaatccattgtgctaatccttgtcctccatgtgaagaataacatcttttcttcagtcccacacatggcctcttattcaccgagggttcacatgttctgatctatatcctcatccttatatgttcttatttctatttctatttctataatcataattacaatgtatcgaatacccagctaaaacagatccactccctttctgtttgtaacacctcggacacagacagaaagtgtgtcacagatcacccacgcttccatgagcttgagcttcataccgtactcatgcacccacccgtccctgccgcccaaatcatcacatgttgacctgtcagaggggcctagatgggtagcacagcggactggattatgtcgcgcggctattttcaccaacttcacgggggctgttgagggtaatatcccggttccgacagttcagtgtgacctagagtcttggcgaatatgatggatcgggatctcgatctcgtcgattggtgaagggaggtcgagtcagcaatatgcgatatattaatcatatagtctgatcgattcctttgggaagaggctatttacccgacttcctagtgaatacctgccaggtggcttttgggtgtatcgatttcatactccgtttgatcgggtgttcgtccagaaatagaccagccccaaccgtttgtaacctgtaaacctataaaatacactattgaaacgattgaatcaattgaatcaactccaaactccaatcccgtgcatcggcccaatggacaccgccacactgtggctgcaataacacgtcgtccttacccacatgctctgcactacctaactatgtatgtagaagtaatttaggcagcacagattcaatacaataaccatatgcatgtcaactaccactgtctatcatcttccccttccagcatgccacatggcaccatcgtcgccttgcagaatgtctcgatcgccacccgatctacggcacattcctcgaacctctgacaccgtagcacttctccatacttgacgataggacacagcttatccaaggctccaagctcaatcttgccaaacagctggtctttcggaaaaaaaggtccaaaaaaggtccacaaaacggcccatcggcaacgggaattctcagtacgactctatctctacaacgttgtacaccctatcaagggatggggtcactatagagttcactatgtcaatagtgcgtggctcatgcgaatgcctcctctcatggcttgcccatggctcgcccatggcaaacccccatgctctcccatcccatctgctcggagcccatggcaatacaccgtggcccttgcccattcctgcctccacgccttttcggtcgtggtcatgggccgtgccttgctgccctttcccaatagtctgtatggacgggtcgtaccgtccaggggtgtaggtactttttcttttcccttccttttcctttgcctttcctcttgcctccaattcccacttcagcttatcccctcgtatggcagtacccctttgtgcaataatggactgtaatgaataatgccccagtcattcgaaagtctcaagcatgtatgtaatgccatcccgcgcatgcgtctgcactaccacctcccactagctacacatatacaacgtagatcgtacatacattgcacatacctgtctatttgcatatgtacgtctgaagtactctttcctcttcctatgttgtatgttgtagacagcctccccactcaaactcctgccgacgatcctcacaccggctcccgttccccgaagctggggagcgcacagccaaagcttagaggttacatgcagacaaggctggcagatcataccgggatttccaaattagaatgtgagcacagatgcaattattcaattatcgtccagcatatccaccacgaccagaaacctcccgtcttgtccacccgtaacttccgcgtgccgccgcccaaccacctccgtcgtacaatgatttcgtacccacctgcacactaggtaggagtgttgttggctattctgctgaaacagagacaatattggcgctcggctttgaaatgtttggatccacttgtgactgaaataacaatggctagggtggttggatttgcctgtccttctgctcgtataaaatatcctctttcctttccctacgcatgatactaccggaatccactcgggtcttcacatgactggaatctcaagcctgacttccaccactcttcacaattgtccgcctccctagactcttattctgaagggcgagattcctcgcctcggcttcgatgtcatccacactccgagtgagcataatatatccctcgtcgtcgagtgcaaagagggcttccttcagccacacccggcaggtgattctctcgcggaatcgcactgaatccacgattgggatttggcgcaggcggtcgaggaagggcatgtggagggtaggattcaatactcctattttgagggctacgaggagtgcttggtcgtagatgacgctctcattgggcagatgttcgaagcgccaggtgcttgtgtcgatgtcgtttagtagatggtagacagagcctaattttggactctggtgtagatagaggctccagtggaatgtgtagctcttgtcgccgcggttagataataggatgtagaggccgtcgacttcgaaggggagctgtggtgtgtctatgttggactggcggcttttctctgatgttgacatattggatgcttatgaagggaagacacaacatgacttgtatgagcttgtcttaatcactttcttgttcgtgtcgtgacacttgttctacataaaccgcctaatccgaccagttcattggtttggtccaatgttcagtgtttcgcgcttaaaattgggtcaatgactagatgagcgccacagcagcctaagtaacagatcaattggagaaattacaggaactaaaatacaacgccattgctacctaaccccaactaatcccaacgttggtccctcaggctctcaggtgtcgatggatccatgacccctcactttccccaacatcggcccatcccgagtggaattgaacatcagacatatcatcgaggacaaatacaacagttaagatcgacgcgatctggcttaatccaccaggcctcaaatgatcaccactggcgaagctgagatgaggtcactaatctgcaatatgctgctactacactgctttatgctagatcagaaagtcccccccgtatccatccaacaattccttgatgatcccaccatccgtactccatatcttcacccgatacccaggcatgattggcagatcattccacgatctccctctccttgaaatcatcgtggcacaccacaccccttgcctgccacaaaccccactggattcatcctgttctcggttcagatgctgtcgcgtgtcgaatgtcagaacgccccgtagcaaaagggttgcactcaatacatagtcctggtggagccagtatttgccaaacatgtcttgtcttgcatgttgagaattccacggggaatcgtcgccgcttcccggcttccctccttactggatgtggatgtgtaaatgtaaatgtaaatgtaaatgtaaatgtatgttcggcgccatgtgtagcgtagctctcgcttttcctctgaggtacggagtacatacatgcatcgtacatgtgcactacgacataatgctgtcgatcatccacttgtgcatattttgtaggttgcttggatttacatttaggtacatgtttttttggtcgattccccccacttccaagattgtatcgattcggtagtttacacccctgtatcattcgaaatggtcgtgatagcccttaattaacactcaattcttcccttgctgtgtctcagatcgtgtcgccgcccgaggtccattgatcccgcccatgtgcttgtgcttgtttcagttcgcgcctctcgggatcgccccgcgtgtcttgtttactttgttatgggtttcaattgccgctgtggatgatgtcagtggactctagaatttgaggtcaagattggaacttgctaggcgctggtgcggagattgtcttgatgcattggtatattctagtctggttgtattttgaatgttgaattcaacgaattagttgaaaatgcgaatatgtatagcgagaatattggtccgacaatatctgcaagactgtaaacagttttaaatgttcaattgtcccattggacggtattttcgaaatcatccgcgatccgtatgagaaatatatctacggagtacgagaatccagcgtgattcgccaacatcacaatgagcattcttgctttgcttattacattagtcttctacttgtactccatgattttcacacgaagttttcttacatctcgcccgtgctgtcctccactataaatctacggagaaagtgggtttgcgggatccatcccgcgacgcgaaggctcattacaacttagcagaggaaaggaagaggtaaggaaagaacacgccgaatcgtacggttagctttgtcgtacatctacacgttggattgagctgtgaatgaaagctctattcaaattaaagcctttagggtccgtttgtcaatgatggctaagagttaaataggtctagaccgactcgtgtcatggtggacaatggacaatggacaatgtgattcctcttgaacttttaagctaacaaccaaccttgaggatatgttgcaactgacctttttatgccatagcctcaatctgcagttttaatgatgattcgacgcgcaataaattgagatagatgtatggctttatataattgttgatgctgaacctttgccagggctgagatgctgaagagaagtgtaaatcagaaggaatacagagttcatggtcagctacttcgcaggtaaacttgatataatccctgttatgtgatatgacatacaacttgttctctcttcgtttgtttaagagaacaaggaccagcaagaccgtaggctctctaacctctgcggttgtcaagggatttacatatctccaagagaaacatatccaaaccagaaccatcctaatataatccggaaatatcatcaagtcaattcaagtcgtatatgcgccatatataatatctacaattttttcacatgtatggatgcagccatgctcatgatttactcttcatcatcctcatcctcatcctcatcctcatcctcattatcatcttcttcttcatcatcattctcctcaaactcaacgccaatctcacccgtgatatcccaccggtcacccttagccgcagcactgacatacttgacgaacttgagagtgccgctatcccgcagcacgatgctgagtcggttccatcccgcttgcgtgctgaacagaatgccatcgtcctcatctgcacctgctgaccggtaaatagccgggtcggccttggtcttcttccgacccaggacttggtcggcgttctcctcatcctcctcctcttcatcttcatcctcatcaccagccatgtaaatctcgtacccacctagtgcgggaccttccacagcgtcgtcggttgttttttccttcggcttggatgtcttagcagacgagccattggcttctccatcctcgtcctcatcctcatcatcgtcttcctcttcctgcttctcccatccggtggtcggggtaagacagagcgagaactccagtcgaggctcttcgccctcatacgcactggcaagagtatagtccttaccgcgacggaaccgtctagcaagtaaattgtggctcgtgagatggtccacaccagtaacaagcccaagccacttccggaaaggctgtgacgggaacagcacgttcaacagctcctggatcgggttatcggtacccttctctccggaagcatgctggtacaaataccggtgcttgtgtggaggccgagcaaccgtccacccgcgctgtgtctggatctcatctgcagaatcaggaagaggctgtctctcctgctcctcgatgtacgcgctcacgcgcgatccaaatttatcgcctaggaaccgttctaggctgagcgaggactcggctgagaacgcgtctgacatctcctcggcaatatcgggcgtcaggtacgaaggcgcaatgtactgaagtaggaaggccaagtcgctctctgtgaactcgccctcggtctgctcttccactttgcccttgcccttgccttcgacttcgggggtttcccaggatactggctgtggctgcggcaggtcgtagatatcgccgcggccctgcagctgcgccagactgctgcgctcggcgagtttctcttccagtccttcctcgtagccgtcttcgccttcttgtgggatgtggaaccagccgctgatagccatgcgcacgcgcttcttggtcttgtcttcgtcgtcacgtggatagtacacttcctcgacatcgtggaagctctcgcccggttggacggtgaagaagctcagttggttgaaggcgggtggaatggagaggctgtagtccgggctgggaattttaacgtcctcccctttggcgtccttcttggtcgttgtcgggaacaagcgcagggcaccgccccactcggcttgccagggtgtgtcggggtcggtcaggtagaggatgtagctgactcggcggctgccgatgacatcgtcgtggcagagaaggtggcagccctcggtgtagacgttgatggccatgtcggtcttttgcccgcttagcttgccggagccagtcacggacgacaggtactcgcggaaccgtgctgagtaaatggcatcgcgcagcttcagtagtgacggcagtttcgagagggaggagtcatccagtccatcgaggttggcgagatcgccagactggaagatcttgtagatgtctgtttccttctcggtgaaggacacttgcgtttcgatctcattgcggacggagcgaagcagagtgggctcaatcagagggtgaatgacgccatgaaggtagctagagattgagccatgttagcttttgccattggaatattctgctgtatatacatacggagaagatttggcgtattcactggtgtacttctgctgctctgcagtgtcgaacaggccgtcgcggaagcgggcagcagcctcctcgctggagagggcccgtttcttggacttgggcatggaattgccatcgagagaggcccttgcgtctgtcttgcgcttcatttttgaggtttgcagaggaatgggagcttcaacagcaagtggcctgatgtttcatagatttttccgggcggtgagggggcgatgaggcggtcactgtgtttgtgttggatctccatgaagatcgcagttcacttctattgttgagtctattatcatttatacaatgtatggtacgtatctgatataattgtagtaaaatctcaatcagtattgcgttaagcgactgtattctaggaggcctggtctcttcgtagatgagtggcgcatagccgatgtccttgtctttctaataaaatagttctgcacgtcagtctttcctttctcctccttatgacctgaaagagcaagttcctcatacccaccgtcttcgtttcgatcgaagccataacagaacacatgtgattgcgccaaatccaggcaccggtgtcgtcataacccgccttatcaccgcaaagacctcgattgtccccccacttaaccccaacctgcttgattcttcaactctgtcgaatctcattatgcagcaaccaggggctgaagccccgatcccagatcagccgggaactccacctcgcccgccctactccccggtaacgcccgtgtttgctcatctcgtgccagtcgcctccaacgagccatcgatcgtcccgccacccgcatctccctctccaacatcacacctccctccacaatatggcaactattcaaatccccctcctccgcccaatccacccgtcttcaagccgcaaccacccccaatccctatctccgagagcgagaatccagatgccatcgcgctccgttcggccatctcgattctgcaaatgcagaagcagcaaagtttgcgcgacatccaggcattggatcgcatgaaagaggccgccgctgctgatccagaggggtttgcgcacgagctcgcagcaggtcggctgaagacccaggaccacggcgctgtgattcagttctcggaggacgatgcggacgacgaagagaatgaagacggttcaaaacgcacgaatccagacggctcaccagcttcgaatttcggccatatccctgttccgcagaatatcgtccgtatgcccccaatcaactgggctaagtatcaggttgttggagagccgcttgatcgcatgcacgaggagcagttacaccgaccgagctctggggagcctcgacgaggacgcgcgccggagcatgtcctggcatcgccgtatcggccgtttgtagatcacttggagggaccgtcgagactcggccgtcctaacaaggcgaagaagacttgaacacgccaacggttctgatgataatggatatgggattatggacttttacgaagttatgtactttaagattatgaacagagctggacttgtgttttcttgactatttaggtttcttggtaagttggcgttttgtcttgtgcactttcttgataaaaaagacagaaaggaaacatacatgatttatctatgccttgaaagtgtcaaggttctaaatttgttgtacaatatatcatataatcaaaagcagatgctgcaattatatacaaatccttatttcggattaaggagatgaccttccgaagaacaaccatagcttatcccatggtgagactcttctgcaaatgttcaggcaaagcaaacagagtttcttcaggcaaacaacccttggcctcatcaaccttcccatccttaagataaccgtcgatcagcctcatagtagcagtcacgtccgtaatcgacacaatccactcatcaatatatcgcccgacagcctccccactcaacccaacctgaatactccgataatctaaagaccgcagaaagagatcccgctcgggatcccactgaacgcgcaccgggctggcacgcagtttcttctgccattcctcctggcttgtctcactaggcgtgtagtgactcaaacaggaatggcgcaatgcccattcgaaaccttcgtgggtaatctctatcgctaggacacgttcctgtcgggctttggttgcccagcctgatcggtatgccatccataggaaagagggcttgatccatgtcattctctcccgtgaaaatggtgggacgaatgtttgggctttgagtgctggctcggctatctcgggggaatatgcttggtacactgtgattgtatttgcggtttgttttgctcggatagccttgtagttatttgagggcattttgagatgtgtggacaagtgttgttgaagagcggagatggatagataatattcatttgcgggaataggaatgatgggacattatcgtaaatcccactgtaagctcggaaattggacttcggcttttaagtgcctacgatatatcttggccctaagcctcatagtacacaccaagcctaatcgggactccgctatactccatcaccggatcagctgataaacccaattgaaaggatagtcttccttcatacctgaggccattgctgatgcctaaggactctttgtatatgtagtataggaatttccgctgacagagtagccgtcagtgcaaagcatcgagagttggactatggtgcggtgccaagcacagggaggtcttttatctgcaacaacacggctggcaactataaaaatttaagtttaagatgcgctggcagtcgtgagaaaatatgagaacatggagaccactgataagttcagtacagcgtctcgtgaataaagagcccttacttgcatcggttcgatactacagcaatgtctgcaaggaactctttacgaagttatcagacatagcttcgaataaaaatatcatagtatggaaaacactaaattcaatgatggtcttctgacaagaaaagctatgcacaagactttggcctagtcctgagctaggagggcctcctcaggtgaagaaaaaaaccccccgaggacacatttgtcgtgcgttcacttcttgtgtggacgctttccaatcacccgatcgattcctcccattgcctcccagtaacgtgcatgagcctcctgggtacgcttcctgttggtctcggcatcgtcctgggacatgtaagaggtgtcgtcaacctcgaagggcgatgcatccagagcttggttggtgcctagcttttcgacgatcccagagtctacaagaagccgggtgttctccctaatgcgttgatcggcactggggtcatcaggcttgcaggctgagagaatatggttctcacaagccgcattcacaggcggctgtgcgagatggatctagattacttgggtcagtaaaggatcggggagtagtggtctggaataagtatcttacactggggccaccagagggcgtgacaggcctggatgtcaagatgcttccgccgaggggaatgttgaagctggtgttggccaggatgatggcatcggcgttcccacaatgctgatagtgatattgattcatggaccgtctttgggcctcagggacatggggatgattctccatctcgataggtggtggaatgacttgatgatgttagcatggatgggtcaaggtgaagatgagattaaagaagaatatactcaccagggggtggttattttggtcttggggatgaaggaacagagacaagatccttgttctggcaaggctgagggcgttttgcttgacttcttagaagaagaggccggtattttgaaagattgaaagagatgaaagtgtcaagcaatggatggtacaatatgaatgtcttgagaagttgaccgtgaggcatgcagttgtgatgagcaagtcagagaacatggagcggttgatgctgtctgtgtcaatcgaaatgtcaatttattactctcgaatagaaggagcgatagccatatctactagtcgctatactaacaggaaggacaacacgaaatcttagaaatacaggattcaagattcaggtcgagatctcagggtatcgtcattataatatgataacatgaaagctgcaagatgagcttgaataaatgcttttgtagtggtttcatattagccatgtacaaccatgagccggaaagcaaatagaacgctagattacctgctggttggtagatcaatacgggaggaatccttctttaattcagatacatgcacattgttcttctcagtgtgttggtcatggtacattttgttgctataactagcctggcaggtttggtccaaatgctgtgaaaacatctagccaatctattccgtgcttgggctaagagctttatttccagcctcttcggaaatatggcactgacacaataggatgaggcattgttctaaatgcttgaaccaagaattgagtatatgtacacattctggtataatatgaacaaaggaatccaagagcttcgaggttgcacccactcaaagcttcgctttcccattcttctcaaactgctgtacagcctctagccctctttgccgaacagcttgattcttctcttcgacattcttccgccactgcaagtttccagcatgatcatccaagccgtttaagatgccacaatacatctcctctttcatggtaccgtagataccggtggcagctttagtctggagcttgcgggtctggatcagcgcaagcgcttcctcagctccaccaacggcatcaacgataccagcctcaagcgcatttcgtccaccaaagcggtgagcttcgagaaccacagtccggaaaacgactggcgtcagcttctcgcggaatatagacatcatgggtgtctggagcgggacgccaaattccagctcattgatacagaggaaaccacggtctgggttcatgactcggtagtcatgatacatggccaacatgaagccggcagcaaaagcgtgtccatttagtagacacacggttggcatggggtatctagggaggatattagtatcttaaatatacataactcgacttgagcctcggactgatcatttaagaaaaaaacatacgtcaggaagcgtcggaacaatcgccagatccagttctcgcagaaccctttggttttcttgacaatgtcgagatccagcccattgctgtagaacttggcaattccactagtcgtgactaagacacctttcgggtagcggtgctcgacaatgtcgagagcgagcagcagagcatcaataaaaatgggtgtcagtcggttgtccgggggtgaactaaaggtgagcacgtagatggtctcatgctctttcgctgtgctagggtttgtgcagacgatcgagcctccagtagagctgatcgggacggtgaaaagagtcgtcatgatgggaatatttggtgtatggaagttgttgaggaaacatagcttgttcaaatagatcgattatttgaatactaatcagacctcggcaccatcacatgccgcaatgatgtcatcacgtgattcccgaagccattcaaaggaaaacacatcgctcgtgatatttacagctcagaagatcttcagcctacacgtaatgaaccggaattcacgcttctctcgataggaaattgttcctaccggggggcaatattttatttgtccgagctcgcaatagaacatccatgccaacccaaatacgaacttgtcaagctcctgatacgccgtttcccacattgtcattgacacatttctcttggagtcggcatgttcagggtcaaccttagatcattagcgcctcttctgaacatccttctcatccctacgtgagtttcttttcagcaggggtgacggcctgcgcgaggaaatgataagcggatccaccatcccggccgcttcggggtaggtggttggaagagaactgcttcttccctcaggtgaccatgtccttacccttgacgatagccttgaatgcggcaatggcgtcgtctagggatacgacgtctgtctcaactcgaagattcaacaaccttggaaaaagcttctagatgtgcacaagtagcggtcagttatattgtgtaacataggatagctattgaaacaaaccagaatccgatcagtaagatatccccaatggtaaggaaatagatagataggcccatgccaacgttcgatttaaagtgtccggagatttggcatgctcaaatccggggcacagatactctcttcggtgctttagcgcgaaagaccagagtaaggtacaaagtgtgtaacttctggaagaccaaattttccagagctggtttgtaccactgcttcagtcttctggctatatgttttcatagttgcagctttcacaagaccggcatatatctagcggcgctctagggagaagtttatcatgaactcgtccaggtgcatcccacttgatatttccatggagctccagaatatacgtatcgtgacctcggggcgacgaactccacgtgtccgttgagtctcccctgaactggcctccgccatgccctcgcagaagatccccagatggggtggggagggcgaaaggcctggggagagtgggcggttaggggcccttttggcagaggcatctttgcctagagagacactcttggtaaatatgggtaagaattcccacaagcacttctcgtttactcaccctccttgccccagagcccccaatgcgaagtcttcttctttttctccaccctcttctctatcttcgcgaccagaaggcggtacttctccttttggcgtacttttttttggccttgcggtactcctccgtcatcaccctccgtgggtcctccggtctcacttgtctagcatgatgcctatgcatatatctattagaaggatgcatacagcgagtatcattgccgaacgttccatgccaccggtgttcacaatgaagttagtcgcatttggcggtttcgacctgacttgcagacattcgaattcgaatagaacttgaaggctgcctgtgatcttcacattttgggacaggatttcggacgatctccatattttggtaaagaataggagtttggtcggccccgatgagtcgcgccgccttgcttgcctcccaggtgtcttccgtgatgtcgtcgggacgatccatgatttgctttgatctgtctccgctcctcgggtagaattccgaaaaattggctaaggggcttaagtgaacaccgttctctgtgtaagagattgttggatccgttgggctgcaccgtactgtcaactcgtacaatcttatgattgttgtagtccagctgtaaggaattgttattggtcgccgtacataggccggctgggcctacgacttcgccgaactggaaaccgcggtatgtcggtgcctttgtctttgtggattttaggtgcatcagttaggaaatgagccatgtggccgcgataaaagtattgctggccgtgtacctgtctgacttcaatgatggtgtgtacgcgagacatcagcatttcctcgacctgggttagctctggtagaaacgtagggacatccccagggtccatattattctagacaccgaataagtaaacgcgatcagcgggtttcttgatcatcgctgctttatccttcttgcgacaacgctggcaaacgcccaccgaagggcctcggactgagagctggagatcgaattcacagtgaaaattatatgacctgtctgcattttgcaagtggcaagaactgcaagagtccattccttactcgaccatgtagctatgcccgggatcgcaccggtccttttggtgaaatcgcaggcgatgcaggcgatgcaggcgatctaattgagaccgcgtcggaagacggtaggctggcaacgaacttaatacagagcctgtggaacgggattggcggaccgattatagactgtagagagccgtacggtctatgccgtctcgtgctattctggagacattccaggcaattttggtgtattgtttcaggagccgcattcgcttgaattgaaacacctggctcatgatattgtccccgattcgctcacgaaagacgtacttgggatcaagatcgggttcattgggattccaacctttttgacgtatccgggagattgacattggattcgttgccggctttttccatcttgtctgccgttttggcaattttggcggtgaaatttggccctcgtagaattctttgaaatcttatgcatcttatgcaagtgcagcaggatctaattccgggccgaaggagtagaaccggccttcgtctttcgcatggaggtggtgacatagcgaccttctcgcttgtgagtagcggctcaccgaggatgatccatttcgaggaaagagatagggaaagtggggttaatttgcaggagggagagaagcaaaccttgggagatatacctctggagaggtataatgcctggggcactaatattgaggcctgaggttaaacgcaactccactgccggttgcgcggagttggtccagtacttcttcttgcagtaaacacgggggaaaattctccgaggagggctaagtggaaaagcccttgccgtgtagtgatagtccttccttggggttcatacacatcgttgaacaagaccgtaagagagagttggagagtccaacctttctgaggaatattgtttcctcatatgtggatagaaaggcatgtcgaacattcagttcctgcatgtagcgggcaacctgccctgtaatataatatgaatacaaaaagtgtgaggtatgaggtgtggaatggaaacatgtttgaagtcaggtcatggggtatatatctgtactttaggttgccatgagaaactgaattgaagaaaaccttcctggtcattttgattgtcttttcggatgtcttctcagatatatatatcctgcgaaaagcatagactgtacacgtgattcttctttataaccttcaattggtaggcaaaaaatttttatattaagactatactgcaggcaaaatgtgatataatgccatactcctgggttcaaaggcgacggctttataaatcgaagcaaaaatgagtttaactctcatactatcacttggtagtgttgtgtaagcctttattagacttccctgctgtcttacctctctttcactcggaagtcagatctcagtttcggatatcttgtcacagacaaaagaaacaacaaggcaaattgattcattgaggggtcgagatctcgagcacgtggaaataataaagaaaaatctaaacaatgagcttcaatcgctttgagtgtctctcatagcgaggtagcatctttgaagtgtacattaggcaatgataagtctcttggtcccacataattttagatcttttcatctaattatatatttgactggacaatctctcttgatactcagatctaacgactgacatacatccacaacaatgtccccgaaacccgtgtttggcccgggccttgaagtggactacaccaacatagtccaaaccgtggagacacagattgaaactctgacatacaaggcatggcgacgccatgaagtgattgagaaactcgaaagcctgtgtcgggagctggcattccaagccacctgcgatgaacgcaagcctcgcagccatcttcttgggtacgcccaattccaacgtttttctatgacgcttagactttatttacccgaggcaatcctagtcctcacgagtgactggaccagttaccagataagtagccgggccttcgactgggtgcgagaggatgagatggaatatacggcagcttgtgtcctgaaggaggcacttcttgccgcacaatctactgactggtatctttgacatggattgtccggagtattgatttctcgatggcatattggcagaccctgattcactgcttagttattaagcagttctgacaaattcatctcaatcggcatttttcctgactcgtaataggtggtagcgcccgaaaatctctatcggggggtcgaagagaataaaggggtaggagacgaagtgtatatggcaatgtcggtgagggttgaagtttctgacttggccaaacttgaattcccagaagacaccggtatccgaaaagcctaatctgtcggaatagatatagccctctgccggggcgtagttgacaatttcaaccgacttggcatatatcctgaactgcctttgagtatcagtctctccaccggctcagtcggtcatgccgttgaattttctcggattgtctcctgttcagatctaaggtcgaacggtatcggcctctgttggaagagagtgtgacctttcgcatagtcgactgtccggacaacggtcaatcgctcagtgcttatgtattgtagtcgtcgattgaaattgtcgggcactatcttgcttgtggatcgtgaactcagcactaccagacccagtgaccaatgtctgtccaatcattcaaaaccgaagtgcgtcaaatcgtggttgatatgacctttggtgttacccctgttagacgtaggttttgtcgaaggcattgcaacctggggctttcgaagcgagagcgaggaagaataaaacaagagctagaaaatataagagtcagctgtttatatctgtgaagatgtcccaaagtagtaagagttggtgcgaacactgcgctcatgcgtaaggatcaggtcttccctcaccattttcggtcaaataagaagttagatataaccattagaagaaaatatagtaaataaaagacagtatgattgaactcctataaaagtgttaagtggcgggattgtgtctatccatgattccatacactgtgcggaaagatagggctagcggggcctcaacatagagcgagtccaactactttggcaaggagatcatttgtctgccatttcctgcagtaatgttcaagcaaaaaaaagctccatagactaactgcagatggaccagggaaatgaagtgcttgtcaaagtagttgatctcgatctaagttgattccccattcgtactaggacggtcctatattgcaataatgttagaatagaataatattaatagctccgatcaccttcatttccgaatctaagctttcttagcaaaagagaaaataactaaagaggaagccgaagaggcgagctggtttttaaatactctgccaaagggcttcgtcaccttgacaataccaatccaccgggctttttccattgtttttcttttcttcctttcgccttccgtttccctcttgtgtccactttttaatttcctcgccttcctcgttatcaggcaatagccaatggtcggatattgttcctgatctggttctcggagcggatgctggcgggctaactaaagtagcgtagccaatcggcatcgagagaagagccgggtaattacgctgcctgtgggtctgcaacagtcgcctaacccgatgcggcagtgcaatttgcgctaaggagctagctagtatatagcgtcgagtcaagcttcgcaaaacctttgcctcggactcggagatagccttagtctctccttgagtctccatagcttcggtctcaactggaacgatttgcctagcactttcggcgctaggctggactaagtatgggcaaggttctaattacagcgcgaagtggtgattcctttagcctacgctctcgcttattgacctccttaatcttgatttttcgagcagtcatggcgagtttttcattaaacttatatccactggctctctgatctccttttgtggatgttctttttagaggctaattctcacacatccatcccctcccgcgatcgtgatacttgctttacattgcgatataaagcgacattgtgcgcgtgctaggaccggaccgagcatactgcgttaacgaagacctccgacatcatgagatcctggttctcgttcctccttttgtccctgacgacgattgtcggggtcaccaatgccaccaccgaatacacggggacaacctgcaaccccctcaacaagacatgtgatgcggatccggccctcggaacagagcacacgtggctgttcaactcaactctcgacagcgatctctgggacatgcgcaccggtactctggactatacatccgaaggagccgactttatcatcaaaaccgagaacgcgtcgacgctcctcgtgtccaacttctatattttcttcggcgtgatggaagcgcacgtcaagatggccaagggggccggtattgtcagcagtgtgatcctgcaatcggacgatctcgacgagatcgactgggagtgggttggatataacacgagtggagtgcagtccgatttcttcggcaaggggaataccaccacgagtgataggggcggatatcatgcggttgcaaatgccgataccgagttccacaactatacctcgtactgggatcgagaccgcatggaatggtggattgacggtgacttggtgcggacagtgaactattccgagccgttgactgtctacggtaaaaactacccgcaaacaccgtgtcaggtcaaggttagcaactggccagttggagtcaagggacagtcgcaaggcaatctggaatggggtggtggtttggttgactgggacgatgttccgttcacgatgacggtatcgaagatccgcgttcaagacttctccactggaaaggagtacaaatacaacggaaccacgggcacctatggcagtatcgaggttgtcaggtgagttttgttctgaatcggttattcaaagaatttcggactaacttcaactcgcagtggaaactcaactgccgtgacagtaatcaacaagaaaccagagaagaccctcgcccagaaatgggctgatcttggcaatggagcgcatatcggtgtgtacgtcggtgcagctgtggctggtgcgcttatgattgccggattcggattctggtgtatgaagcagcgtcggagcggccgtctacaacgcgctttgaacgatgacgaacacaccgccgagctcacgacgttggagcagtcaaagttgagatggaggcaaagtgagttgcgtagcaagggcagctaccagccggtaccttaagggggtcagttggattgtatactatgtttcggtcatgtttattaatttaatgtagcacattgttatatatcccgtttatttagagagttcaaagccggagttcgtcgtcggtcacagcatagcatattatgtgtttgctttatcttaggtttgttcgctataaactcgaggaacttagttcgtagtagataccgatgaatcgctcggataccagacaaataaattggcacaggatagatttccggaatgcttggatgcaaaccgaagggaaaacaagccagatagttgagtcagtaacggatgtcaatccgcctaaacgaaatctggtcattggtaccccagaacagatccgatccacttgcactcgcccactcacacctatctcatcagataccatgggatgtattgggatagtatggtgactggtcaaaagagatttgtctgcttaggagaatgaagtggggcgacgatcatctcgagtcatgaggacaggctttgattgtcctagcagatggtggggccgtgtgttcttcgaatggggagctggggagcagatgtaatccggactcaagaactgaccgggagggtgacaggtcgggttggtctggggacacttgtgcagtactttggtggttgaaatagggaagtgcagacatgaaagagaatctgaccggaagtgacatgtcggctcaggtctgggcacattcgtgacgtagaggttcaactttgctactctttcaaaagtcaagcaattcatgacgcgtttggcgccattcacgccgccatcgcttcgtcgtcagaaagaatactcggtgcgctgctcacacctgaactgtcgctgtccgtcacctctgaagcccgggcacgaacctgcaaaccccagtcttggatgctggggacaccaccctcaatgacgacagggtgttcctcagcactctttcctagcacagttccagcatagcgcgactcctcgccagtcttactgtgtttcttcttcaatgcagtcaggtaatcctccttctcgacggcgtcagggtccaccatgtcaccctcgctgggcacaaagccggcaacacgtcggatttcacggtgggcggggccggtgatccagccgaggaaggcatcaagaccgcgcatatcttcttttccctgccattcctcttcccattcgcgtagttgtggtcgtatggcgcctgcgtcctgcagagcttggtagatgtcttcgaggtcgggaactgggtcgtatgggtgcgcatttgcggcatgctcggcagcagctgacgcgagaataatcagatatcgcccagtcaggtcctggatagactccaagactgaggggcgtgttgagtggaagccttgagcacggaggatttggatgattggagggcggaggagagcgttatgaaggttcgggcccgacattttgcagaatatatcggcgaagaagacagagagagtagagggacgtgaaatgaaatgtagaaaaagaaaaaagaggagtgttgaagcgtacaggcgactgagtgcgccatcggggcataaccctctcattggttaatattgccggcagtatttaacaagtacagtagctacgtcaaaagtgtagtacatcaacttgtctaccatgtatatactctccaattgtatttgatactatgcaactgtatgctgtgtagaaccagtttttttctcttcttcttttcttaacccacataatggtagtatcaaaatctttcagaaagtagtataagatataccaaaaaagacatcaaaaagacaatacataatacggagttgtaatgccatacatcgcatactaattacagccaacactagacatacctaaagtattttagcaggttgtgtcgctagatgaagattgtaaagtgatgtacaacgcgtacgacataaggtgtcccatagaatcaaaagatatatcggaatgaaaagagggatgagttctttataagcttcaagatcaaatagttacaccattatgaagtacaactaactactccgtataggtataaaattaggatacaggcctcgggaaggcggtgatttggggcggtgaggtggtatccaagagagctatcgatgccagtagcatacttagtcgcccatagaagtgtcgaagagacggagaggcgctgtgacagggttaagtgtcaagagaattgtgaaagcccatatctgatgtgccaggctttccatgccgacacgagtcatgacaaaatcactcttattctgcggtctgggctggcaatgtatgtcttcgaagggaatacagatgctaccttgaatatggtcacagcctggcgccggatccttggtgatctccatattctgcaccaggaagggaatcccatgctcgttgcttttccattgcgcaatcgtgatttttccctgcagtacttcgatactgagtacaacgttcacttctccgttgctttggttgagccaaaacatcatgtcgtcctcgagctttgttggtatctcctcgcatgctacctcaactgccatgctaggccatttggtgccaaaaatgagtcggcctccaggaacaatcggccctcttgatccgccctgaattgcctcggactgatgttgaacccataggaaggagcatataatctttctccactatttaattccaacattcgaccatgccgaagaaagaaccgattgccactgaatgtgctccagtctcgagtctgataagagcatggccaatggaagggtcgtagctctcgcatgattgtgcgaacagattttcttcaacattcatattatcaaggaaggaacgctcatccataataaaaatagtataagggttagataactctgtatcctgtctatgtcgctccagttcctggtctagaatttgaagagcatcctcaattcccttaaactcatattttggggtcgtagaaggaaggccgtgttcaaacatgatggatgtgaaatgtgagagaaatttcaatggattgtaagagaagttatagtccttcagacgccaaaatgacacaatagttagttagttaactaggatggacatggtgcctattatgtaaatgtgcggtaaccgccccggtggaacctcacctcctcacttcctccactcaccttactcaccttacccttgctaccaggtatcatcatattgcgactatgccgcctttaaaaatcaaattctccaggaggccagatccgccagaagaaccagcgcctatacctgcgcccgtgcctgcacctgcgcctgcacctgcgcctgctcccccagccgaaactccccaagccccccgcaagatcacactcaagatcgcacgaaaaccacaacctgagagtgaagaaaaaccaaagaagaagaagtcaacaaagaagcgaccagccgaaactgccgcacttcctgagcttgagcacgaacccgaaccggagacgagccagcaaatccccaagcggataaagctgatcccatccaagaagcctgctttgcagtcaatccgcatcaaaaataaaggaatcgttcccaaccgaccagtaggtgttgggtatgactccgaagcctcggacaccgaacttgatccgtccatcgaagaacaattcatcttacggatgctccccggagaggactgcgatattataaggaaagtaatcaacgacaggacattcaagaatggcgacgtcgggatcaaacccctcacacgggagggccggcgctctatcgtgaatgttcggggccaccaatatgcggcagctctcgtggatctaccctgcatcatcgagggcatgaagagctgggaccgacgaggctggtacaagtcagcagatatctgtcaaatgctcttagttctgggacgcgtcaacagtgaccaagaagctatggaatacccactccccccgggcgttgactctcccgatgaaaagacacttcaatacgcacacggtatcgcaccacccctccgttgggttcgcaagcggcgtttccgcgaccgcgtcagcacccgcacgatcgaacaagttgaaaaggccgtggaagaactcatggcccaggacgacaattcgattttccctcccaagttcgagttggtggacagcacatccctgaatcgcgtcgagggcttggtacaatcgggaggctacggggatgaatacgacgatgagcaggatgcatacggtgaagcggaagaagagatgatggacgacttcgaggatgcgcttgctgccgagatggaagcggcattggctgccggggatgatgaggcaccgggagcacccgagcaggcacacactacgtcccagtcgttcacaccagctggaggaccgaccgaacgcggcgacacctctgcagatgagagcaacatatccgacgaggacgaggaagatgagctggatgacgaccaaatcgagcagcaacaacagctccagcagcagcgcgaggaagtcgccgagctggaagctctcatcaaaaccgagaccgcacagtgggagaaggtgcaaaatcatattttgcgcaacaagatgggccgacggatccaggaactaaagaaggacctacaactgaagaaggtctctatgggcatgccagccggggacgatatctgagctcctgtttcacatcctatgtccaatgggattttcggcgttaccatttcataatcatacccagtttgtccgaccgaatgcgagtgcggtctctatgttgatacaagcagccttagctagctcgaaataatgaaagttatgtccaaacattaacaaccagataaatcacgctccttccatcgccactctaagatcgagataggtactttcaatacctatttactccgcacttaccaccggatcaccagtagcctctttaaccgcctcctccacatccaacttctcatcccgttccaacttctctcgcctgacagcctccctctccgcaacctccgcatccgccccaggctcacccggactgctcccaaccctctcaccaagaatgcgatcatgctcagctctcttcgatcccaaattcgccgccagatcatctgcttccccgaaaccaggatggccaggcccacccgcactcccaacagggccagcatgagcaccggcctgcgcgcgctgcatccccatccccttccgctgaactgcgtccgcgatatacccctccgcgggctgctcctcgacgccgtattctaaatcgacgtccggcgcattgtggagttcctgttcgtgttgctggtgctgtgcgctcagacgggctcgtgcttcgtcgcttgagggctgggactctgctgtacgtttaattaccccgatcgtgtcgccgtgttgtcggcttgtttcggtccctgctcgttgctcttgtggcgtgtgtgagacgggattcgaggactgcgcgtaggcggcttgtttggggggttgggcggtttgggcggcggtttgggagcgggtctgcatggtgatacaatgggatctagatttatgtttcggatattggatatggtcaaggggtaagaggttaaggagtatgaagtaagtatagctcaagagctggataaccggctgaagaaagtgacagctgagtacccacttgtgacgtcagcgtcttcgaccaatgagagcgcgtggaagtacaaccctaaggatagtcgcgacaagatttggttggctcaatggttcggagtagtcttgttagatgtcttttgtgtatagatctctttcccctttcttcgtcttaagacagacggtagagaaagtcaaaaaatgcttgatttagtcttccatgtataacttgaatccactctacaacataaggggtaaatcaactgcacaaagtactttgtcctcggcacttctggactaactcaataagtgcgacccagcaaggctaccgaatcaacgacaatcgccttattctgcacagatcgtcgtattgtcccaaactgtcgggactccaagcccccaacacgaacagtatcagtatctcatcccgtctacccccgtccatgtggcgccactaccacctgcttctagactaactccaactgtaatccaagtaattcaactaatcagactaatcagaccgccccggaagtatgtcacccaaccccctaacccacttcgacaccgtccgaggcatgaattggggtgaggggaacattgtgtgacccagtccctccccactcgttttctcgcgatgttcttctcctatctttcacataggctgaacgcagaaccctctcggtatctcactcatggctcagcaactctactatctgccgcgcggctcgcgcatcctggtcaccggcgcgaacggcttcattgggagcaatgtcgttcacagtctgcttgaactaggctacaaggttcgcgggactgtccgcgcaccgaaaccatggctcgatgagatgttccgcgggaagttcgggcgggactcgtatgagtctgttgttcttactaactttgagaacgtggatactcttgttagtgtaatggatggtgtgtctggcgtggcgcatgtggtatgtatttggcagtggaattattcgatgggtatgtgctaatgagacattgcgctgtgtaggcatcagatgttagcttcagtgcgaatccggaagaggttgtgccgtgggtgttgagagctgttcataatgtgctagaggctgcatcgagaaattccgctatccggcgggttgtcatgacctcttctgcggtcacggcgttgtttccggagccgaataaggagggtgttgttgttcgtgagggtgagagaccacttcttagagaagggaatgcaaggatgtattggttaatattgtatctagactcctggaatgacgaggctaccaagctagcctatgattcggatgctccaccacttgtgaagggcctttacacttatgctgcctccaagaccgagggagagaaggcagcgtggagatggatggagaagaacaagccaggcttccaattcaataccgtgttaccggattttaccgtgagttctatgccaggccatcaaacgtatgatattgacttcgattagctcgggagaatcctacatgaacagatccacggctcgacaatgggctgggttactggcctacccaaaggtgacacacgtatttttgagacatttgtgccgcgtaagttgacactgcttgattgttcgatcattgctgatataaaaagaatacttctgcgatgttatcgatattgcgcgtctacatgtggcggccctcctcgacccaaatacagtctcccgtcgactcttcggatttgcagctccgatcaacctcactgatataatctcagtcgttcgaaagctccagcctaataatacattgattcctgaacctcctgttaacgagggccgtgatctgagtgaggtaatcccggctaaggacgcagaaaggctcctacgggaattctgtgggcgaaaagggtggacttcgttggaggatagtattgcccagggacttgaggtatctcgaaggccgttgtgttctttatagcgtcccattgatttcgcaaatacaataagaaatcttcaagttgttgagcagcaatagtgcagaacaggtgacattctcccgagatctcactctgcagtttccgactttccacagactgctggtgccatctttctcgctttcttcgccgtcaaaggtgttgaagtattctcttgagacaatttgtaggcattttggctgcgtgcaacacgcccgactgttgacttcgagagtcctctatcgacactagccgcaatagcagcccagctgggtcgatcatctttcctcaccaagcgcgcagtataacgcgcagtttgatcactcaacttagaagggcgtcttcgtccgggctttgaagacatatctttgcgttcttgaaaacgcgttttcgtacagtaaacagtggatcgcgcgacgcgaagatctttggcaattttgatggctgaattcccattttgaagggctttgataattgctgcacgtgttatttctgataactcgcttggagccggctttttggcttttgttgattgagacgtggtgaagtatcgttgcaaagagacgtaattccaccgtcacctacttgccgacatcctgaccgaagagaatcagttacctcggcaaaccgaacatctacatgtaagaccaaaatgtattcaaaccaggcttgaatatcagtccttcctattagaaaaacaaaaaggcgtggttaaagtgtaataaaccattgtgaatatcggcagatctacccctcaacaagaaccactcccatcaatggcagattccacacctacgctacagcaagctgcggtggtgcaaaacccaggagaaaatgcaactatcactcttcagaatgacatacccgtcgcaagtcctggacaaaatgaagttctcgtcaaattaacttgcaccggcctgtggtaagcgcttacattccgaaatgaattcaccctcgaaaaactaacccataaccatcaaaaaagccgctcagaactccgcgctgttttagcctggggtgcatacaactccatcatcggccacgaaggggtcggaattgtagtaaaagcagggcccgatgtctcggagtcccttctcggtgaacgagtcggcgtcaaatggctctacagtgcatgcaacaaatgctcggtctgcaagcgagggttcccgaactattgcgcacagcagctcaatacaagtcgccatgttccggggacattgcagcagtatgttatcgccgatgcgcggttcctgacattgatccccgggggcgtagccgatgaagttgcagcaccgctactgtgcgctggacttacgatggttggtgctttgtcgaaacttgatcatgagctgcaggtgggtgactttattgttatttcggggtctgggggaggtttgggccatattggggtgcagattgcatccaggatcaaaaatttgcgggttattgcggttgatagcggtgatgataagagagctttgagtttggagtctggggcggaggttttctttgattacaagactgaagatgtggttgctcgagtgcgtgagttcactggggagggtgcgcatgcgacaatcgtcgtgccgggtacgaaggaagcattgcagatggcgcctaacctggtgagaaacatggggtttgttgtgaatgttgggttgccaccgaatgacttggatattcctctttcggctacactttgcacagcgagaggtaagatgacggtggtctcatagtcaatcatatactaactctcacaacgataggtctcacctttatagggtcatctgtgggtacggaggatcaattgaccgacttactgcaagctgcagctgctggaaaaatcgcaccatcgatcgaagtctttgaattctcggacgtgccgactttgatagagaagctgagggatgatggtattatgggacgcgcagtgatcactttgccacagtaacttgacattccatgtttcaattttaagcaaattgacaagagagcaaaggcgagaagagaagggttgttgtattcttattcctggtcacacttctacagctacctagtcatgaaaatatattcccataaagacatcgtagtgttaccagaggtataacgtccctaactaattaacatcttggagtcaggccaggtcattaaagtcttacgttcagtaacgtagctttgtatatataacgaccagatcattcccagttctcctgtcagacaacttgaccacccctgctccgggtgtcaaaacctgaacccaaccaacctacttcttgatgatctggaggaccggtgatgatactggagcaatccaacaatgaattgattccggcagacgttgttctcgtctactggatgatgaaacaattaatctcaatgagtggcttgtatacttgtaaaaataagttctagctcatatccactgagccaacggtcgtcccaaccgtcactacctccattgacggactgccttatgaatctcatgaatttgctttgacctagagaccggtatcctgcccattcatatatgggaatagttgggatgcttgtatatcttcttcgtcggtatagtcatacagagcaggacaccaaatccatggcttggtaaggtgactggcattataggctttgatcatatctgcccgaaagttgtcttgctggcttgtgtcgcgattttcgttgcctgtgcctttgatagccatgcccggggggattatgagctcattgctcataatcttccacctctattccattccaagcttcgatcatgccggtgaaacaaccgatgattgttgcatgtgctttagtctccattctgacgacaagtttgttgatggaaggatcatagagcttgcaggattcattgtgtcatggtgattattccccgtttttgtactttgatgctgagtacaacaccaacttctcagttgcttgcgttcagccaaaagattataacttccacaggttttgcttgtgcttctgaacaggctacctcccttgaaattcttcacggtttgagtctagaatcttggctgtatccatcttctggactgggaagcaattccacgccctgtccggccctccactattatctttcccttgacttgtccgttactttcattaagagaagcctgacatccttctcaagcttcgcccgtgatttaggtgaagatggggagagaagtaagaagtgggaatcaatccgggagggtttatatagctcttcagaggtcatatgaacttgtgctttagtctaacctaccccggccaacgaagttaggtaccgttcgtatgttataccaatacaaaaggtactttcttataccatatatacggcacctaagtaagacttcttgatttttttttggcatgcaatattgactaatggtaaataggcggctaggcctccggatactaaggtaaccttggaagtatcgtagcgaccgccttcgccttccatatcgaatacatacagatatacaaaagaatatgaggaaaaatgggaagaaggattactgcccatggaccacgtgtactgggcgaaattcaaaattcataaataatgagcacaaactgagattatcgttgcccgcgccaacaccaggaaggtgtgctgggcgcttggcagattccttcgaaggacgctatgcaccgcgagagcagtgacatcagctccgatccccgattcctcccctctccaactccgtaattcaccatggtttacgcatttatcctcccaaccgtctcgcctctatcatttcaatcattcatctcctctgccactcatccatccctcccccaatcagccacaacaacccgccatgcactccgcctcgcattgaaggcccacaagcgcctaccccgcggcccgcgccaggatgcccacctacccgccgttctgtccgccttgaacgaatacatccccttcctgttcgcaatctcaaacggactgaatggtcgctctgttacagcgaattcccaagacggctacacgacagggggaacgaatatccgcgccgaagtagtcgacatcacagcccatgcggagatagagtcgacatggagatatacgctgtcatcctcaggcgggttgaatttcgggcccgggggaaataacacaagcggaaacggtatccgcacgcggaatggacgagtctctggccgcggcatccacttcgaattggcgtttacgctcacaacgctcggttacgtactgagtaggatggcgcgcgcaggagtcgtcgctacgttatacgcaccgtctaccccgtccgcggagactcgtacggctgctgtccagactgcgacacggtatctcttacaagctagctcggtgcataatctgctcgcgtcctcgccgactttcaccgcagctactgtgtcgacggtaccggagctcgagtctggtacgcagtctgctttgtcgtctctggccatggcggaggctacattactggctgtccttaaagatgatgcgtatgttgcggcgtgtatccaatcgcgcaatccgaatgataaagagtggatggtccgtgcacctgagataccgaaggtacgcgctctgctatttgcaagactatgtgttcgtgccgcagagtacgccgaacaagcggcggcaggtctaggtgcagttggatctacgtctggtcgtgcaggccgtgtggatgaggatttggtccgctataccggagtcttggctcgcgttgcccgagcacgcgcctgtcgattctttggtgtggatgcggagctatcaggcaaagtcggtgagggtattgcgtggttgcgagctgcacgcactccactgggcctacgtggagcagggtctcaggaagacactactgggtcaggaggctctgcaaagggtggactatcccgtttaaagcgagaatggacagagcggcgtgaggagcgtcgagttactaaggatgctggcggtagtcgcagcgacaaaggtccattggatgcgggagatgatgctggccgtgatgaggagggacgagtcctcgcgatgcttgagacgaattgggtgaaaatgaatgacacagtaagtttgaattctttacgtcactctagcccaagtgagacttaatatgtatgacttcctgacccgatgcagatgaacacgcagatcattccaccatctgcaccattgctctctaatctgccttctgggcgtgatatccactctcccccggcaccataccagcccccttctttagatgacgatcaactcatgcggatgcgtgccccaccagatgagagagatgacgttcaattcggaagtgacgacgatagtgaagacgatgcaggacaacctgatagtcgtgaacctccgggtgcattcccggaccggagtgcgacagtctcgaccgtttattattgaatacggatatataagtacatataagtacatagcatgagatacggtgattataccgaagttagcatttacttggcggtccaaggacaacaggtgcccgctaaggatacattgggatatgaggccgtgtgtgggtctttactacgaccatgaacatcgtagaagaaaaaagaagatcaaacaaagtgatattatgtacagtacagtcggacaagagcatagagggtaatctccagacctcttctgccatcttttcgtctcccctccgacacggacccgatctaggtggctataagatcaagattggacaggatcggatcgaaaccacgagatttccgtccaaagctgatcatttcatctcgatatcaattgtagaatccccgcggtgtcgatatcaatcatcaaacccgagcctcgaaacgcaatcgcatagctcaacacacaaaagatgtaaacgcttattccggctgtccaccgaagcggttcttctccatgccgaggtaacccctaatcttgctctccttgaggagctcgaagtacttgtctgcaaaagatatataggtcagtacaacgcatcgcaatcaataccaatccaatccaatccgcatagcccacaatccagtcagatcagggtatttcgtagacaaatccagaacaccgaatctcctggatatagcctagacaggacacagaatacggaaacaacccacctcggtaaacaccacacttctcaaggtggttcacgccctcgcgcgcatagcacttgcccaattcctcgccgacgagacgcgccatcatgctgcggacccactgctcacggataatggcatcgcgggcgttgtggagtgcgacgttgtcctcgaagtcgacgccttcgtaggtcggggcgacagtgggcttcttggcgaggaaggcggcggactcggcggtgggcattgtgggtggttggtttatggggattgcgttgaggtggggttttgctggggttgttgcttgctcgggcgctgggcagtgacggcaagggttgggagagtgttctcttgaaagctgcttgatgcggtcgtcggcacgttgatcttgaaggttggattacgtgggttgtgattgggtggatggagggcggtcagggtggtgtggtgcgggagagggagaagaccttctgcgcagatctgaaggtcacgtgaatctatacaatctgcaaacggcaggacagagtgagcgaggtttggataagattgaatttttatgtggcttagaggaactaggcactattatgttcagtgaagaaatgacttgcgaaaatatcatattttcaatgaccgtggttgatcaagataatgcggcattactaaaacgatacatacatacaaaacaaaaactttaacacaagacctcctatgatgcgaggcatgaccacatggatgcaaacctgccgtggaatatatgtgatgtgaatggcataaaacagtaaggttcactcatccccatccacaaccttccccgtcatttggtcgtatagatcaactacactatctctcaatcgctcccaaccagaccggccaagccaattgctcagttcgcgatagtagtagatttccgaccagcaatcacgaccaaacatacacccagccatgttaacgacgaggtcgtgtgctgcctgctgatagtgaacgactggattctctccgtcgccgcatgcgccaggagggaaggaattgatgctgcgttgtggtaaaaagccaacaccgctccggacccatggttggctctgatatatgtactccagagcatcttgttctttgtgctcccattccatgtgcatctgctcgtacatgacgggatcccaccagacatcgagcagccgttcggtccaaagagaccgtcgcaggaagaaagatccgagattgaagccggagcagtcttgtgtcaggagcatattcaaagaatctgcctggccatcgccctcgcgagaacgaccgagctcatcgagccagaactcgggtagtggatgggtgatgttgatagggttataggcattgatatcacggtagacgtgtgacttgaggtcattgaatatatggtgttggagagatgtgtcgtactccatgacccaggtgttcaagtcgagccaccaaaaccactctgcgtctggatacttgcgcatggctttgcgaatcacatcgcctttctcccagctctcgcgccattcatgtgaatatcgcttcttggccagcaaattggccagctcgagctcgtagccccattttttcgcatatctcttcttgttccatatgctgttgcgctcaatggcccattcacgggcacccttccactccatgacgcctccctctacgttggatccgagtatgatgacgaacttgctcccgccgcctataggcgaccttcggtatgtttggacaatagctataatgcggtcagagtggcacgtcgaaatgatatggaattagcaatcacttactcgcccagcaaaacatatagccgatccacaccaagaacagcgccaataatagccggaaccgaccccggcgcactggtatgcgtaatgcgcctagcagaccacgcccactacccggacgattccattcccgaccataatcatccttgtcgacgtatccctgcgacgaaagtcttctcaagctaggaaatcgagcgaagatcttgtgtcgttgtcgagagaagaagccgctattgcgtgttgagaatgatggataccggtacacctcctcgctctttgccttggcttcagcccatgaaacgctgcctggtgtgcctggcagtaatgaaccggacgatggtttattcggcgatgtgctgccgctgcccggaacgagtcccgggctggaccaccccccgcccgcgtggggagagggcgaccgcgataaggtcatcgcaatgatcggcgccgaatagttgtgtgctagagatcgatcgctgtgaaatcttgaggccatcgaccggagagtaatttcgtaattgcgagcgaagggggttaattcgttgtgaggtcagagtgacagacaggacgagtgggatgaaattaggaaagaagagagttggcagttaagatacacaacacaattcaccgtggggacattatacaccggattcgagatgcgaggaacttgaggccgaatgcggcatgtctgtgctgattgcatggcattggagcaggtgcgggctgactttcggtgtttcccagcgttgaagttgggaaattgggttttgatctcgcgttagtgtcaatactcgtaaaccgaattattcccaggggtcaatgactcctgctgtatagttgacatacagtttaagtctaatttaacctacgagctactcaatcaagcggagatcaatttgcggagcgcggagatcggctccacattcctacatctactcgaccgcttgcggacaaagaccattgtggagtacagaaacaattaatatcatgcggaccacgcaattactatctatgaccaaagcggaaagactaataaaaccaaatctcaatctacttccgatccttgcattgggactgaatcggcattcgattcgtcgtcctgtcggccttgctcatgagagcttgtcgcaccatgaaaccggcttcaggtccaggccggggctgggcgctctcaccatgggtaaattcgcactggagcttgaggaacttcgttctgtctttgttttggtacacagtgataatgtcgccggtgtagagtttcccgaattgtaaagcctcaggaccatcctcggtcatagagccgcggcgcaggagtgtatcattcacccagatgccaagacgcgctttggtggagagaatagccataaccccggggatatcgagccagctttcacctgttgcgatcctcgcctcgattcctggagtccaaaatgtgacctctagtgcataggcggggatcctagtgtccatggaatcagcatgcttgacggtcgcggacggcccgcgaccccaggaggtgagcctatcctcaaggtagattgtcaagtcgaatatcgaaccgggaaggctcttcagtttgccatatcgttttggtggtttggcaaactcggggtcatagagagtggaaggaatagggggtgagttgggtctatgaacaatcggttctgacgagtctgcttcctcgacacagacccgatccaagatagcttggcctgtctgcgcatcgagggtagtagcaaactcaacgtcgtattctgatttcgagggacgagaggggtagttgggagtagtgtcgcggtggctgttgtggtcactattatcgctagatgcctcgctggctgtgtcagggattgcaagagtgaggtcaatccgacgtgtgaacttcgctttgggggttgcctcctgtggactcgagacagattctgccttagggctcgaagtcggcggaagagaatcctttttcgggctactagatagtgtctcgcccttggtgtgtccaggaggggtctgccgcaaggaggatctgttaaccgggccacccttaagttgcggagtggggttcaaggaattcatgttgagttgcccaacgagtttctctgcacccatcaaactgggtgcagtgccaccgaagggtaccgccgggagggaaatgatcgactcgttgggatcgtcgctcatcatcgactcaccggaagagagaaagtcaacgtgaaaattattggcgttgaaggcctggatattgccgagtgcgtgggagctccgtagagccgagggggtaatttcgccaaacaaacgtttggcactattgtccactaccgcttgtccatcttggaagctctcaatatttggaaggctgggatagtgtacatcagtcggaatgtactgggtacgggggcgtttggagattgcttcgctgccgctactctcctcgccgtcggcttcatggacgtagcccggaccgtcagcgatagacaactgtgaagcgtctagctcgtcctcgggatcctcgccaatgattgaaagccgatcttgataatcatatagcaagtcgtcatcatcctcatactcatccacatcaggcacctcggagatccaagggtgctggaaacacttcttctctgtcgggcgtgagaaaggatcgcgattgagaagctgggcgacgaaatcgattccagcctcagacacgcctgccgtgcgtaatgcatcgaaatcagcgtcgcttgtcatgatggtgcgaagcatctggagacctcgatcttctgcacgccctgagaatgggggaacgccggcgaggatatggaaaaggactgctcctagcgaccacatgtcaacggattggctgtatggggatgttctggggggtcttttaacgtcagcagaggcttctcaagcgaaaggaaataagtgacttacgggtctccaacgcgacgcctctttcggagctcgccacggcggtattgatcataatctgggtaaacttccggcgcgcagtatagaagggttccacaaaaagtttttaggaaagtctcctgctccaccactttcgacagcccaaagtccgatagcttaattctgagcgggtccaacgaggcaatcaggatgttgtccggtttgatatctcgatgggtgatgtggcgtttatgcaaatagtgaagcgctcgcaacacttgtcgtgcgatcgttctaaccatttcctcgggaattctctcctgcgtgtgcaggtatgtcgacagctcgccgcctggaacatactccatgatgatgtagatccatcgatcatgctcgtgatgatcgatgtattgaacaatattcggctgcaacacgttagttctatagttaacatgcaatcttaaacatattgcttacatgtctgagatctctcataatcttcatctcattgtcgaccttctgatcaaggataccgtttttcatgaagcgacgcttgtcgagttctttcgcagcatagatggcgccatgttgtttggttgcgatcttgtacacagtagcaaaggcgccctttccaatctgtccagtcacgttgtacatggcaccaccggtccaatgcatgccataagcgttggcggatgaccacgctagagcagacgggcttgggccctgtcgctctttatgggccggagcatgtgcatgaactcgttcgaaatagcgaaacaagttctggtgatagtggactgcgaatccttctcgtaatgggattcgaaccacgaaccggacctcgtcggagttttggcagccggtaacaacttgaatgacagatccattcgtgagcattcgactattcccatccttctgagattttcgtaggcggcaattgtccacaatggtaccatttgtcgacgtatcttgcagcatgagaatgccgtcctcggtaagatatatgcgaaaatggttatttgacactcgtttggcattatcatcgacactcagaagaatatcacaacgagaccgattgcgaccgaagcaaaatcccagtcccaggttatgaacttttgacgagagcctcaacgccaaatctaatgatgcagtgtgagaggagtcgtgccctagtatgtccctttggagaatatgctgaggacatattccgccagtggcactgacagcatcatgggcagcatgcgaattcggatgaaggatacagataatgtcggccaggtcttgatcttggatgccggagttattcattcccattcggcgaggatcagcacatggctgcgtggattcctgggtggcttccattatgagggtgaatgcaagtgtaaatgaaggtgctaggggaatgaacacagaaatgagctacgggtacggatccgatggagtagggtatatgtgctgcgctgccagcaaggggaatgtgcataaaaaggtcattaaaatgtcgtagactagatatatgatgtgtcagtggttttgcgccaacagcgaaagctcggagagggtttgtatatacctcgagggaatgaatgctagggccggggagccgcacacccgggcaaaagttggacaagacaatgaatgatatgtacgcttcaggaccaatgatacaatcaccagggtatgtgtcgcctcagcaacagattgcccacgaacgttttgcttggtgatcgcaaggagtggaaataggcaatcagatgagcatgagcgataagtgaaccgtgtgccttgcagagtggggagtccctcttcagctcttctcgaagctagcgttgatcaacacagatgatgaatgatgcacatgagacaaaagcgagacttcaagccctcgtctgcatgtcataagaatacgaatcttgattatggggttgcagatgtcgaccggcgcagaccgtcaaatgccgtttaatgagaagctaccgaatgctgtttccgtattaaatgctcgaattagggattttaagcgtcgattttgagagggccaggaggtatgtctgtggaatccagttttaacaagttagcaaacgtcctttagaagcttgaagaggcatttgtttagccccgactcgagatcgagaatgaacgcacacagcctgaaatatccccgatcaatctgtccgcgggtagcaaaattgggacagtagatagataaaaacggggacgccgggacagagcaaaattgcactcctgggaaggtcgtcgtccgaggaacaagaccaggaacgagccgcaacaatcgtgactcggtacctgaggcaacgacgcgttcctaaggcgcgtaaccccttactcatcaggcaacagagccgttgattggccgagtatgtgagaggggttaaccactcaagttcgatctatgaaatacagtgtacacgataccattatgaagtatggctatagattcgttattatttacgtcaaactatttacttccatacggcttgctagtgtcttcactccgtttgaaatcacccttcagcgcagtgtcgaacacttgctccagccgtgcgagcgcttcgtccgatacctctgtgacaggtcagattttcagtcatgcatgctcagccctgaagcagactacccaggtaaggaaccacttacggtaatggaccacaacgcggccacccaacaatctcagccctttctgctgtccaatctctgccaagtcattcggccccactcctgatgcttcgagatccaaccaaatcatattggtgtgcagggggtactctagcttgccaccgcgactggtccacagatcggctacccgtttcgcctttgtatgggttgctgcaagcttcccggtctggccgttggggtccgtgccaaaagtttcggtgagcgcaacgcgggcggcagctgcaatcacgccagtctgtcgagcgccgccgccgatagatttgcggaaccagcgcgctttcttgataaactctcgggagccgacaatgatacttccaataggtgcccccagccccttcgagaagcaaagactaacgctatcgaagatgcttgcatattcaggcaagctcccagcaccggccgcgacggcttcccacagccgagcaccgtccaagtgaaccttgatgtcattagcatgagcccattccacgatccgcttcgcctcagccagcggcatgatcatcccatcgagagtattctctagactgatcaacttggtggggcaataatgaatattatcaccgagaactgcgtgctttttgacgtcttccaaagtcaaatgcaccccattcttaggaatgacagtgctcacggtggcgccagtccaagcactcacaccaccagcctcataacagatgatatgtgatcgatgatcacacaatactgaatgaggtggctgcgcgagatgcgagcgaatggctacctggtttcccatggtacccgaaagaaccaatagactgtcttcatgtttggtaaaatcagccacgtagctttgcagctcgttggtgactggatcctcgttgaagacatcatccagaagagttgtctggcagatcgcttcgagcatcgacgctgtaggcttcgtcattgtatcgcctgaccaaaatcagcttcaattctgtcatccttttccgatttagtcatacttcggaggtcgaactcagcggctccagccccatgccaggctgtagtcttcttatcactgctaccaatgaccgccgaggcacgagccagggcatccgttgagagttgtgccatagcaattggaaagatttttcgaccgtgcggggctgtcaatcgaaacgccgaggaagagcaacggatcggatgtaacaagcgattcatggatgagctttatgacagtaaccgcagatacctgttgagggaattgggaaagaggggagtcgccacgtgatccggagacagatagctcgctacattgtggaaccgggatggatctcatcctcatctgtacagcatgttgcagcggtggtcggagggtaattatattcataagcccggtgctgatacaacctgaaccttgcgttccatccatcagaagtgtacaatctgtagctccatgcctccgcggctatgacgacaccgttcttacacagtccttatcgataccccaattcggcctagtgcatccaacggtcggcctcgaccgctgactcagcaatgtgcttggttgcgggcaatgcgcttgactggttcaagtccgcacaatcttacaagactctgattgcttacactaggcactgcttacactgggcacaatgatggacctatcccatctcacacggcctggcattctgtgccagtgtgctcgatgttccagctcactggctgcactggagaatgagtgggccaaactatctaatgcctactcaatcccgacagcatggctgagtgtcgacctccatcgcatcgcggtttcttcggagcggaagcaaatccctcatacatcggatatgacccttctgcgtggccgtgtcattcaagaagtgtcatgtaaactctgccagcaaaggatgggggtactttgtccacttgacaacgggtaagtggctgtcgatcaagaccggggcttctcatagctaatcttcttttaggatgaatattttgtggaaaatgtcgaaagttgcttttagggagattgttaccatgcgaacggtgcagcctgtattcaaacagggggccctcgaacgactgatttgtcccccgaaagaacctccgcgccgaaacaccgatcttgtccagggaaatgcagtggtcccagctggctccaccgatcccactaccgtcgatccagcgatgcaaaaacaaatgatccaccagggtagaagtatcgatcagatttcgaactcagtgaaccacctccaagatacaatgtctgatctcaaaaactcatttacagcccttcgaattgagttgaatcgacccggacggaatttggcggaaggttccatacttcaggggcaagactttgacatgattgctatggtgctcaaggagctcaaatccaagtctgacgagatcgagaaactcaagctggagatcgaggccctgaaactgaagaatcgctatatgggagtgaccctgccacaccagcaagagtcattgtcgatcatgaacatgaatgctgcgcttcctgaagtccggagccccggcttactccaagcgggccggaaacgcaattggcctgacgcattctcgggcgatcgcagccagacaatcgcggattccctggaggaagatgatatggtggatgaaatgtctctatcagatccgctgataaagagctctcgcattcctctcaatgaccaaccccaaccagcaattatcaatggtccacctggtgaagagcaactggagtccctagaggggctgatgtctgctcgagaacctgaaaatatctccatccctcttcaaccccaatccaacttgcagcaaactatagccaaacgtccgcgcctaggtgtgcctttcgaggaaagcccccaaacggcccctccgcagccgcaaactgttcctcagaaaagaccgcctggcaggccgaggaaatcaatcagccagcccactatccccgatctcaccgaatcacccagtatcgctccttctaccacgcaggggaatgtggagtcaaacgttcaacaaaacacagtacgacgtcgcacgtctcgtcgcagcttgcgtgcgcaatcccttggtccaaataacagccatgcacatagtgaagaggaccagcagaacacacaagagtcaactgaagctccccctgaggctcacccagcgcccaacaaaaagaccaagcggaatactggctcccccaatggaaagcgaactggcggtccagacgaggacggagatgaggccgctatgaatgagaagcggaaggctaaggtcgcggcgcgggacgtcatggccaagatggctttacagcacgaggaggctttggaggctgagaatgcatgataaatcgccagcacttatcactcacagacttgtacattagacaataaaccacacataacgtatcatgaccaaagcttcaactgagaccggctgataataaagtctgtgcgcgccctcgtatacacctagaacggctcttatataaagccctagtaaattggaccaagtatctagctcacttcttcctactctgattgagagatcaacgtgataaactttcttgttcaaagccacagtatatcagtaaagtcgaaacttggatttgctaacctatgcggatatcccctaacgcagtatcatatcataacctcataaaaatcattattttcagtctgtgatgtcccagagaatcttgcgagtgtcactagcgagtcgggataaagtgcttggaactggcctcttgttcgctgaatgattcagggaatgctgcgataccaccaatgatgccaatagccatgaaagcaagagaaatgagagaccagatgactccccagcactgggaagatccaccgtatctcttagcaaagacgctggcatcggagctgtttactttgcgaaggatgagatcgtcgcactggagcacatcttgttagccacataagtcaattgagtgcaactggtacttacaatatcccagacactgtacaatgcagacatgacaccaatgaacagctatagagaaaagcaggttagttcaagttcatgacgggtgaatcataggacaacataccacgacccagcgcaaggcttcaccgtggacaatgaaccagcatgccaccaacaatccgaccgcgagaagaatagttacgatagtcaaccagtctctccgcgcccaccaaagggtaagcagaaagcatacaccgaggacgaaactagcaaccttgcttgcgacaatatcaaatccagcgaagatcaacagagccccgataatcgaagaccccaggtacccagcaggcaaagtgatggcactcataccgccttgcatatgggtaacgccgccttcatttggatccagcgagatagacttgacttttccaccagtacagcaggcagtaatcgcatggccgaattcatggaaggcaatcaccagcatctgtgcagtaggttagtcacagtccgtcaatatggggctgggagtatttaccttgaacggccatagtacccagcggacatatggtagattccatagtagtgcgatgaccaccacatacactgccattatccccaaggtgacggcttgggtatggttgacacttaagccacgccgggccagttggtgcggggccgtttcgaccgcgctttgggctagcgctgcatatagggctggcatggtgagcgataaacaggctccgtaaatgagaaagagggagatgcagatgttgaaatgacggaggaagcgtaagtgcagaatatttaatggtcagctaatattcgagagatcatccgcgcgtccatagggccgcgcatgccagcagccacttgttttgttttgtggctgatctcccttgggctatttttagtggcttggccttttaggctgaagggtttcacctttacgtcttcagtctatcaacatattgaaatgatattcattacaattagcatacattcaattcgctatgttctttaatccatatgggagatgatttaactgaaaatcaatacgagagggttgcacctgccatctgagttaggttatatatagtgaggttgtgaggaagtcacgtttgacaagctaaatgtttctgaataggcaatatattattcgctgctctttatccattcaccattcattcaatctcaaccgctaatcccacagacagaatgagttgtctaggacgcagaacattgagatggtggttcacgatgttgagtcttcgacggcagtcccccggctcgcggcatcgagaccgtctccgagaagagctatgcgagcgtcgacatgcagagacaagttggcaaaagcttagtgagacatcagatgtcattttttcaatcacccgggcccaatacgacgggtttccaacacggaatccttcttgcttgtacagcctccatctcagcccgatctacatgtacatggttgcaaagtacacgtcacgatggtccttcttcgaagcagccgccctcttctgcaatgcccggcactggaatcttgtgcatgaggtcgtgaacccaagcaaggatcacaaactcatagaagtcgctacccgccatgacattgaccaaacggagttccagcgggtgagccgtcagcttaggcgtatttggccactgcttccatgaatcacaagtcatgattccggaatagtccatagcgtagctgtatgtttgctgcttagattatgtgacatacgttacgagtcaattcactttctccgtttctctttgcccctcgataacaggctcagctttaattcacctcagaaaaggtttttatcattaaagcttactggatcaggtctgaccttcccttttaagtaccacattttcccatctacgataaagttcaatcttccttgaccgctcaccttcaccagttccgtatccacgatggaaccccacgaagaagtgaactgtgatgaccgttcccacccatctcctcgagctcagcctaccagttttaagccggtaattattggtttgtatggcctccctgggtctggaaagtctttccgactggaaggactcaaaacggtactggacaatgacaaatttgcgttctatgatggcagcaatgttatcgcagcggtgactcctgggggtcttgaagcattccagattttgaccaaagagggtaaaaatgatgcccgcgagcgtgctatagccagagtcaagcaggaatgttccaacacggggaaaagtgctatagtggctgggcatttcatgttctgggccgaggaagatgagcagggccagtcagtttgtacaccgagcgatctgactacgtatactcatatcctatacctaaactccccagctgagctcatcgcggagtatcgttcgaatgatgttaaacggtgccgccagactgtgtcaacctctcatctggccaggtggcaggaaatcgagcaaagccacctctgtcaactttgcagatgccacgatatcctgttcacgctagtgtcgccactagtatccgccaacaagctcggttccattgttgaggattttcggatgcatacggaggactacaacatgtatctcgccaaccaaagaatggaagacatactcgcttcctcctccacggcggaaactgtcatcatgatggatgcagacaagacgttggcgtcggaagatagcggagttcttttctgggagcaggtccgcagtgcttcagctaagcgcaaccccttaaaagctttgttcagtagtccactaggatattcgtacactgcatttcgccaggcaacactgctgtatgaagaggctcttgatgatgtggagtttgaggcctgttgccagactgtttcatcaatgatacacatgcacattgatattattgatctcttctacttgattcgcgatgcgagtcatgtacgtgtggtcgtggttacctgtgggatccgatctgcttgggaaaaggtgctgaagggaaggggtctcacggtaatgggtgatattcgtagtgaccgcacgagtgggtggtatgatgaatggccgacgcacttgactgaatgctggagatagacaagttgcttccagtgtgtccatgctggtgctgcatagcggtggtaggatagggaatgatgagtagctgagtgataggccatgcagtgggtgatgtcaagaatgggatatggcccctctaggtcctaaacaagaaccttggtttttgttatggtctagtggtaaattacgctgcacgaatttcgtcaggtgacaattgtggagtgctagaggcctcattcgatcaggataccgggtgttgctctcgcacagtgacaataatgactttaatattgagctagagcggttagacacatgccagttggtctggaaggctgtattgagtacccacctgatattgactcaactcaagcgaagcgaacttcactctactcttggcgattcgtgataggtaggaattgccgtgtaaagttaaacttccactgcaattttataattaaacagtgtcaccgtccgtctctgcagcaaagtatgttgtggatagccgggaagttgatcgagagaatatttagccgagtttctcaacaataaaagcaagagatatgtaagagcatcccaatgaggtcttgggacaattgagtctcaaagacgcattaggaaccgtccatgaaatcttcatttctcttcatttccccgaccaaacaagcgtttcggtcttgacaaaatccccaaagaaatgtccggaacgatgtcattcgcatcagtgatagcgtgggtgcctgccaatctcatggaagaaatattcgggagtgttcaggtacgttcgacactgggacatataagctgcgcaagaatctgtcacagaggtagctcattgatgactctgtatataactcgttcccatcgtggatagccacctagttaatggggactagttggaaagggtcaaaggtgtctttgggacttgaaactcactgggagatattccacacagagcctccttctccagcacctggcggactcatgtccccttcggatggtactgagctgcgccctacgcaacaggctagatgcgtcgttgtgtactgaggttgaagtaccgagactacgcctcaaatgtgccaaggcatgaacaagcctgctttgtacaagctccatgctcgggaatgttgaatagtcatcagccgagagtgtatgtggaagacacagagttgttggagcgaaaagcgagtggggctctgcttttgtggtctcggcccgcgccccactcatatccatggttccccaggttacggatgacgcaggacgtgaataataatgcctttttgaatgttcgatgtcgatgttatattaatgagacctgggtatatataaagggggttacagaggaccattttatgaatagccagggatatcgctgtcaacaaagtggctggattggttcctgaaacaaagtgaggaatgttgctaccagcttccagtgaaccccgcattcaggagattgggatcatcaactcctcagatcgtcaaagtgggatccatgtaatgtacggacatttgcctcccaccaacgttctacatcaccatgctcggcatgctccctgtcctcctagcgggacttgtaggaggtgcaaactcccagccaaagacagacacaacctatcacaaggatgctggtgtcctcgaatttgtcaaccctctcatcggaacctacggaacaacaccgaatggcaatggcggcatgatcccctccatcagcccgcctttcggaatgacccgctggacaccgcagactcgcgagaacttcatctcgcaagtaccctacggcgatagcgaccgcctcattcatggattccaagccacacatcagccggctatctggatgggtgaggcgggtcaggttgtgttgacaccggggatcggtgaagtgcagccgttgtttcagaacaggggattgcagttccgaaaaaaggatgagaggagtacgccgtacgtctatgaggtacttgttgatgctgctcagctcttgggtcatggttggaatgcgacggctgaggctgtaggtgatgggcctgttcccggtggtgcgggttccgtgccggatgaggtcaaggagggtgccaatgggcggacgcgaaaaagacaaattgagtatgtcctgcctagtagagatggtaatcagtataggcagtcgattcaggtatttccactttttttgggatcgccatgaatgctttctgacgattccagattgccatgtccgcagattcccatgttggtcatcttcgatttgacttccaacacagtcctaccaatcaagatgaaaaatgccagccgtgggtatatattcaagcttcgcgtcggaactggacaggcgaaatccatattgatgcgaacagtcgggaggtctacggctataacactgagcgtcaggattacctcctcggaccagacaaagcagcgtcattcaaaggatattttgtagctcgcttttctgagccatttattgaatttggcgtggcagatggagggttacttataaaggatgaggctcagcgacacgggaatttcacgggtgcatatgtgaaatttgctaactcgacatcgcgtgtcgaagtgcgcaccggagtttcgtatataagcattgcacaagcaaggaggaatctcgtgatacagactccagatgagcacaccttcgaggataccgttgaaaaagtcaaatcagcctggcttgagaagttgggtagggtatccatcaagggcatcaacaagaccgatgcggaccacgaccctcgcactatctggtataccggcctgttccatgctctccaatatccaagcgacttctcagagccaacatcgaagcacgaagatgcttcccgcgttttttactcgggatataccgatagtgtccacatcgagaacgactcatactatcagtcctggtcaatctgggatacatacagagccgaacactctctcttaactatatttgcgccggagcgcgtcaatagcatgatgcgatccttgttacgcatcttcgattggtccggttggctgccgatgtgggccaacttggtcgagacgaatatcatgatcgcaacgaatgcagatgtcgtgcttgccaacgctctggagcgagggtttaggggcttcaatattgccaaagcttgggaagcggtcaaaaaggatgcatatactccgcctgacaacgatactgatactctgtactatgaccgtgagccggccacatcatatgaggcccgcgctggactcacatcatacatgaaacagggctgggtgtctaatgatggctggtctgaagccggtagccgcacattagactacgcatttaatgattacgcctgttccattgttgcttcctatgcgggagaggacaacgccaccgtgcaagccctcaagaaacgaagtggaaattatgcctatctttggaataaagagactcaatttatgcaagcgcgcaacgcaaacgagacttgggctaatagcacttttggatggaccgaaggcgatgactgggtctacacgtttgatgtgatgcatgacgtgaaaggactggctgagatttttggtggccgtcaagccttccgcgataagttggatgcgcatttccagggtggtcacaatgaccacacgaacgaaccaagccaccacgtaccatatttgtattcagctcttggttatcccaaccaagcagctgagatagtcaggagcattgcttgggagaactacaacgcgaccagcgggggcttgggcggaaatgaagacttgggacagatgagtgcttggtatgtcttctccgcattggggttttatcccgtcaaccccgctagtgatgagtatatcgtcggtacaccattatttgagcaagtgtccattcgtcttcctagtggagcgagcactggcggagaagttgccaatgggaaagagaggaggcttgaaattagtgccccggaggcgtccacgaagccgtatattgttagtctgaaaattgatgggaagagtatcaataccccgatcctgaagcacagtcagattgtgaaggcggcaagaatcgactttgagatgagtgctacacccacttcatggggaagtcgccccatatgggaaacttgataccaggagaacatctaaagtccccggaaaatgaggacaacactagctgtgtccatcatgtgtttagacgtttccaccaattgaaagtcgattatattttcgtagatcttgtccgggactctgttgtggtgcctttttccaaggtcgactttttaatcgacttgatcttcatcgcctcaaattcccctgctccatcttcgatatacccatgtcgttttgtgttttactcattggagctgacaatgagttccaccgcccctcattgattttcttatcacctcattctcgaggtctgttgcaaagtattgcgccatagtacatgccacctcgcaatgaacacacaatttcttggccgcggatagagttcaactcgactctctaactggtcgcaaattaatccttggctttgtttatgacctggtgatggtatatccccatgcctgctggagtttatcatgcacggcttgaacaaggattagaccgcgtatcaaggcaatacttgacgaagctagaatctaacatgaacgccacaagagctaaaattccattggcatattccgtcttatcacatcattatagtagtttctgatgacgcctgccgcacccctgaccgcgccccagttattgtaggggtccgagttgtacagtagtatatgtacatgcgaagtcgcgccatgtgtccacgtaagatcaaagaattctctccagccttcccttctgccttccgaaatgggtcttccatctcccgtacgggaatataccgagtcggtccctcaatatgagaccagcgacagtgatagcctacagtataccaccgaggtcggtgggaacacctccaaggccacataccaggaggcctcgggagcgcccgttgaggttaattccccgctggggtattcggtcggttgggttacagtggttttcctgaatttgagtaagatgatcggaacgggagtcttctcaacgcgtgcgtacaacccaactttctctggattatttgatatactcacatagaatagcgtcgaccgtcctcaaaggcgccggctcggttggtctcacgttgttttattgggttattgggtatttgatggcctctagctcgctatcggtctacatggaattcgcatcgtctttccccagtcggtccggctcggaggttgtctacttggaacaagcgtatccccgacccaagtactttttccctactgtgtttgcgatgcagacggtgcttttctcgtttagcagcagcaatgccgttggtatgattacatcgcgggtgaatggtggagtgacgtgtactgactttgtctagtactggcccagtatctcttcaaacttgcgaattcggacttcaccccatggaaattgaagggagtcgctgtggcttgctatactgttgcagtactgggtgagtggtactccttttatctgtatcacatgtgctgatgaagtcgccatagttctggcatttcacaccagatggtctttgcgactggcaaatgcaatcgggctagtcaaactgctgacattggtattgtaagtgttgatccacaatatactcaactcaaccggtaaagctaactggcacttagcattgcgataactggcttggtggttctcggaggtcatacctcagtgaaagatccaaaagcaaattttaggtctgcctttgagggcagtaatgccgcgacagcctacggagcaaccaatgcattgaccaaggtctggttctcttttgcaggctatgagaatgcgttcaatgtcgtcaatgaagtcaaggtatgtacttcacatgatcatgaccacttgtttgctaacaagcactagaatcctaccaaaaccttgaagtggagtgcgccgctctcgctgggggtgacggcaattctgtacgtgctggccaacattgcctactttagtgctgcaagcaaggaagaaattctagaatcgaaggtcgtcgcggctggtgtctttttcgagaaggtattcggaactggtggtgcggcatccgctttgaatttccttatctgtgtgagcgcttttggaaacctgcttgccgtgcttcttggacagtctcgcatgctgagggagtgtggaaggtcagtgatgaaacagaatttacttttggaagggaacctaatgagttgtttggatatagacaaggtgttttgccattcacttctttttggacgtcgacgagaccgtttggaacaccgctcggtccatactttgtgaaatgggcattcaccgtgttgatgatcctagcaccgcctgctggtgatgccttcaatttcggtacgcccttttctattatctgaccttctagttgatcatttctccagaaattgaaagacagtttgctaattttggggaatagtggtggatctcggagtctacgccacgacaatctttggtctgctactcacaataggcctggtgatcattcgagctcgtcgtgcacgcctcaacctgccaaaacctgaatacaacgcctggcacgtttcagtggcatttgcaattctttcgaatctgtacatggtcgtaatgccatggtacccgcccagtactggggcgaatggaggcgatgtgagcttctggtatgcaacatattgtgcggttgctcttggaatgtaagttgttcctattccaggttgtccctgtcggtatagatcactgacgtcaaagaattaaaacagtgtcggtctgtgtggagtctactattatgtctggatcaagcttctgcctcgaatccagggattcaagtgggagcaaacggttctcaaactggataatggtgccctggcgcatcggcttgtcagggtgcccaagaaggatacctgagatatgtcattaggtaacctaataagagatgcaactcttggtatattacccaactactccgtacatttatatcattaccctttcgcccttacgataccattttagcgtctaagacgtgatctcatattggacgccaagcctgtgcgggactccacttcccccggggccgacccgttccttttccagctgtaatcatatctacacctcgcaggatgcacgacggaaggaattgaattaacttctcaaggagctgagattgatacaatctgcagattctatctcaccacggggttatgggctgaagatggcaagcgaagtggtaccatgcgatgaaccgatgggctgtcggctagggagcctatttctccgtgagcttttgaggctgttcatcattagacaaatggatggcactacaacatacgatcaagactctgttgctaaggttgttaagggcgtagcaaactgcaccttccaaaacttagttggttcgttctcggggtcaaatgcctgaatgctttgtttgagcgtttatctttgcctggtttcagaccgctttcaggctgtatcgtgtactacgtattggaaaccgggcgggaataactaactatgctctagagtgcacgataggctgtttgtaactgtaattcgggtatctttattttctgcccgccagaaataaggcattcatgcgtcaaattcaggcaagcagctttgagcgctataacgtaatccactaccgagctggccacaccaccgagctggccaccccacccaaaacgcgtccatgaattagcacttaatgaattcaaccacccaccatgccactaattcgctctcaaagctctcgaaattcaatagagcaagaaggcaggatcttattagctatccaggctattaagaaccgagaaattagttctattcgggaagcagcacgcatcttcgcagtaccgagatcgacccttaccacgcgcctccggggcgtacaaaaccgcgcgatttctcggcctaactcacataaattgatagaaatcgaagaggaatcgcttataaaatggataatatctatggattctcgcggatcagcccctcggccctctactattcgagaaatggcgaatcttttactcaaattgtacggaataaccccggttctttcagtcggcgagaattaggttataaagtttgtaaaaaggtatcccaaactcttaagccgattctcaagacactataactataaacacgtaaagtacgaagacccgaaaactattagggagtggttttatcttatttaaaaaactatcctttaatatggtattgatcccgacgatatttataactttaataagactggttttgtaataggattaactgtaaccgcgagggttattataagggctgaatattacagttaccgatcgcttttataacctagaaatcgcgagtaggtgactgtaattaagtatataaatacttcaggatagatattccctctatatatgatttttaaaggtaaagtctttattaaatcttggtttaatagcctccctaacgattagcaatttaaagttagtctaaacagatggacctctaataaaattagacttcgatagcttaaaaagctctttattccgttaacttctttatagacaaaggggagatatcgacttctaatacttaacggccacagaagtcatttaaccctaaagtttaacaaaatttgtgaaaaaaataatattattctaatctatatacctccgcacttatcttaccttttacagccacttgatatcggttattttgcagtattaaaacgcttatatagtcagatagttaaaacgaaaatacagagtaggataaattatatcgataaacttgatttcctcgaagcttacccatctgcctaaatcgaggcctttaaagaggatactattaaaaatagcttcggagcagctggtttagtaccttttaaacctgatcgagtgattttaaagcttaatattcgccttcgaactccgaccccccttttgagctaagagaacgagtaggagctaaaaacaccttcgaactataaacaattgctaaagcaagcttcctcaattaaagcattgctttgtacaaggtctcgaagccctccgagcccgcttaattctgcgataaaccaggttttaaaagcctattaagttacaatacaatcggctgcttttctcaagaaagaagtaagcaatttacgggctataaacgagaagcagaagcaaaagcgcactcgatctagaaagcagataccttctaccgagggcctctcggttttagaagcatcgacattaattgtacagccagaggaagcaattaaactacctccccctcctcagccaagaaggccttcgccacctttattaccctgaacgagagtgttaaataggtgcagagcatgtggaaatctcgggcataaaagaaatgcatgtccagatagacctagatagatagttttattaatttatggcgttttggttgagatatattgatttaaaattcagaggttggttttggtggccagctcggtggtgtggccagctcggtagtggattacgttatttagactttcccatcaccatttccccatctgatacatcccaacgaggccaatttcatcgtgagttttatttctatctttacacgcttctaatagctaacatctacacttggactaggcactctctgcgtggaccctacaagcaaagtcaagactctcatctatttaccctcatctaccaccaagatgccatccagtgacgcacttcgtatatacccccccttctgcattccaacacaaattgttatctatggctgactttaactggaacagaaccgcctcttacgcccgctgagcgggcaattgtcaaatcctacggcggctggacacgcttcatgcaaagctacgggctcaagccttgggaagatgatgatgccgaggagggaaagaaaatcctggaggcccttgctctacatgaggaagcttccgaatgagacgggtctagccggtgtttggctacaacagaaggatgcatcaccttgattttgccttggactgatggatgtcgaccatacgttctccgcaccctccttcggactttcgattagattcaatcaagtattttcttccagtgcttgcattgctggtacactgtgctttttgggatttatgaatggtagagcaatttttcgaatgcaaaaggctgtcaggtattacattagatgggcgcacgcgatccatttgacaatttcaatttgctctgcgaaaacatagaagaatgtcacataaatcaacaacgcaccaatccaactccaacaaaaccgaaaccgagaccgaaaccgaaacctaacctagtttgaccaaaaaccaattcataacccaacaccaccttgccgatagaaagaaggtccgtaacctactcggtttctcccgctggattaccggcaaaccacatcgcaaatgcttcaaatacctctgccgtagttttcctctcagacaggtgataaagatcagaagagcgtagaataaggctttcaccatcaaaataggactccagcatacgtgcatgctcgcccatgaacgaggcgaccaaaacctgtagagtacctagttagtaatctatgaaagtaagaaagtgaaaggagggggtatagacttaccggtgccactttatggtggagtaaccgcaccatcctgaactggcagatcattaggcggaggataatcaatagctcgccacggcagagcttgctatcatccaccagtaagccgctgtgtgcgattactttaatatgtggggctgctgccccggggatgtccatgatccacgaaacgccaaactagggcttgtcacacttgtacaacgacttgaaagcatggtacttgcaaacactagggagtagaatagcgttagaaacaatggggtgatatgataatatatctcagaatagtaatggatgacacttacggctttgaacgccatacgcggtcattacactcccatcgtacctctagaccataatgtcgccacactctttcgaagtgatatgatctagagattgtgtcttcaaaaaggccttccacatcgaccgcttcatcgatcacttcatcggtaggttgtgggatgttagatatcgccgcgaagtaacggggcttgaggtccgagtcttccctaagactcatatgctcgcgcttgatgttcaacttggcgagttgcgacgcgtcaaattcatgaacctcaagagcttcgatgtcatcatggagcttgactagagccagacggtgggcgaaatggacttttgattcccgagaagttggctttgaagacatctttggtagtgttgtggtaatgatggcttgtagagttgtagaaatttggaagagtgtaactgggggggacacgctaagaggaagctgatcggactaaccctaaagagatgttactcccagtatggaccgtgggatactacagaggggggtcatatgcgtgtgttggggccgattttgttagcaattgccttgcgagctgaacaggagggcaaggaagaggagagcgaaaattaggagagcgaagacgaggagagccgagcctcatatgatgtactgttttgtggactgcgttgatttcaatcatgtctttcgtgtttttgatcttttcttgatatgtctcgatttgtttttgttcagaatggtctattatgttttggaattcatgcgcgtctttgtccataaagatatcaatttgtgtattcaagaattgtaccatcgctatcgtatagtgtatgatccaagtcaggagttaattaacagtcacgagggcttatccatgaagtattacttaatgcccaggtggcaatcctgcgtacggtataattccgaatgaagcatatcaaaccatatctatgagatatttaagtcgcccttattctaggatttcaattcgaatatgactacaaataagtgttcagcaaatattctagggctcccttattcctctttagtgcgactctacatagtggcactaccttatattgcccatggcttcgaacgcagtgatagtgtgtgcgatagagagagagatttcttttggattcttcctgtcggcatccagcacgaaatgtcatatactgtgaatttcaaagcaaatatgaagcaaccttcttatcatccgtccgtaacattatcattacactgtcgtgccatgtattcaaatatcccagatgtccttgtgtatctgtaaatcctgaatcccgctaataagctatgtaaattgcaatcagatagtatccttaatgggatccttttcagcatcttcaatctttttcaaaaattcctctgccgccttagcatcgccagggaatatattctcggcaatcattctgcgaggtgagctaccaagccattggaacagtgagaaatcctggaatcgatctgcccggaaaatttccaaaacctccagcggttcatcgtcactcaggttctcaacgaagtgtcccatattccgaggcacgatgccgacatcaccggccatgtagttgaacgttctggcgtttccttctgcggcaaatatcgtaactcgcgcacgacctttcttgtaatatgtccattcgtcggcgttggggtgccagtgcatctcgcgtagtgcgcccggtgcaatctctagatgggcggctgctactgttttggaaaccgggaagttcgtggagtcggtaatacggacacgaccgccgctggttttaatgggttcttgggcgagcatatgatgtgtgaagttaatctttgacttcttgaaggtgcgtggtttctcctcgtcaatgcttcccgggtttgagccttggaatatgtacttctcggatttcgggatgttgtcaaattgctccggtgacatccggaagttctctcctagaactgctttgggagtgtgagctagggaaatgggtcagtatttgtaaactatatattttgagacatggacagattcatacccaaccaatcagtcaagatgaaggtggactcttcggagaagttgccatcgtcaaagatcaacaggaattctgtcccattttcgcccagaccctggagcgaatgcggatgtccagcggggaaataccacagatctccttcctccaagtcgtccataaaagtaccgccttctaagtctagggctgtgactcgtacttttccagcaagcacatacgcccattcagcttccgtgtgccaatgcagttcgcgaattaccccttgatccagacgcatgttcacaccggcgagttcacggctagtgggtagctcgtggatagttgtttgtcgcgtccatccgccttcctatacgtacacgtctaggttaatgacgtacgtgacatattagaatgaccatacctcgatgcgaatatgtgagtctgcaaaactccatcgcatattaggcatattgccatggtcggtactcggcggacggacaagatcggggttctggcgctcgcgatcccgattccgcggtcccatgaccgtagtaccatctccattgcggaacggcagtggatgtcggtcatcgccaacagagtcaaccttgtgatcatatgggtcgcgatgtcctggggagaaaggtgggttttttccaataggctgttgaccgaataatgctgcggaatggccggctgggacctgcagtagcttctgcaggctgtgatcaggtgcagggatagcccatacagcctgaagatatgccaggtttaacaagaagcgtgtaatttgcatggtgggctttaaaattaataaattagacagaggaagagaagaaattcccagaagatcaagtgtaaactccggaaatgttgttctccgcatcgacgtcacgacattgcgcatattccgatcgcatatcctgtctccaattgttcaccccaacaaattggccgattctattttagtgcacttggattctccaaataggtagggatgacgtctcattctttacggtgatcaattttgagttcctacgccaagggctccacagaaaccgaaaaaacaacttctctccacttcaatccgacgaccattacaccaatgtctgaaacagacgccctgttgggcaaccacagacgctccaaaccctctctactatctctagcatctaaatgcttaggcagtgaccttgatactgcgcatggcgacctagtccttctattctgttatattatcaccggcctgctcgacagctcagcggtactcatatggggctcctttgtgagcatgcaaaccggcaacactgtatatttcggcctgggccttatcggcgccaaggatgatcgctggatcaagtccggagtttccattgcggcgttctgtctaggctcgctatgcttcgccaccttccaccgtgtcttcccagcgagacggagatgggtgctctgtgcctcattccttgctcaaaccgtgtgtgtgtgcatcgccgcgttgatcgttacaattcatccggcatctcgagatgcgcccttgacttggttggtcctcgtcccgattgcgctcatcgcattccaaagtagtggacaagcggtgacgagccgtgttttgaacttcacgggcttgactagtgttgtcctcactagtacttattgcgatttgttctcgcaccctgatttcctctcgggaaaggtggtcggtcatactgaggagaaccgccggattggtgcaatcttgtgcttgttgttgggggtggtcttggggggtctctgggctcatagctctgtgggaatgatgggggccttgtggaccgcagccatcctgaagtcattgattgttgctgcatggttggcctggaagggaaagagcgaggaggataccgaatgagttgcaaggctgatggaagatcgcggttttgcatagattgtggactcatattgatgtatttagaatactaattggttatttcgaaatagaggatactgattatactatctcagttttctgcaaccatgttcaacgactatgaaatttggattttttgtctactgtcttgaaaccccgtcaatagatctagagtattccaatctaggggatggtgtcgcccttgatatctataattaaaaaccaataagatatacatgtatgccttgggatattctccatagtctactccatctcccagcgtccaagtcaaaattcatatattcatttcatggtcattatcatctcgtaatagcctagccaggtacataagaaccaaaacgaatctcaatgtcaatagctccgctggaccgtcatcgcaggcccgacatagtgtcttctgccctgaaacaggtacatcaaaagactgccaatgaacacactaacgaaaataaccacactccaattaaagtctcgagccgaaggcaaagggctcggaggccagaacgaccaaaagagtgcgaaaataacatagagcagcccaatgatatttatcgcaagaccgaaacgaccaagactccaacgtcgaggaggtagcgtttcaggacaagcaatcttccggtaaatcacgcaacttatggataccgcgtatgtgtacatcagtgcagcaacgttgagagagatgatcgcgttgaatgcaacctccgagcctatgttgattaccgacagtaagacactgatcatgcatgagagcgcgatcgctcgcactgggattcgccgatgaaggtcaactcgagagagccagtctgcgaaggggaggccgcgatctcgtgcgaatgcatatgtttgacgtgcagttgatgcattgaataggatgttactgaagatgactggtattaggattattgatgtgaggccgttgacaccggagattgagaggaattggtggaacacgtagaggaaggggaagccggtgctgtcgttgatagcatcgggtactgaggggatagcaagaagaaatccaacgattactatcagtgctagtattccgttgccgaagtatccccatacgattgcgattggtacgtatcgacctgcatccttaacttcttcggacatatgtgcggtggcgtcggagcctataaatgtgtccatgttagccttgtaccgcgaaagaatgatacggtttgtacacactcagagagccgtagatggctgtaatttgaccgatcatcaagctgatccccatactagaccagttgccaccattgtggaacgatgtgaacacggttttggccgagttttgaggagccatggtgaacaaaacaaccacaatgatgacccagcataacagatgtagcacgagaaggatgttctggattcgtggcatccagcttgccgcgtagacattgaaaaagtaaatgacagctatcatggcgaacacaaacaaggttccatgccaattttggggcacgtagctcggatcacggagggttatgagaccttggatgatagttccagttagaaacgagccggatgctgctcctgcctgccaggctagtacggacatccatccttaatcacacccattagcgatcgtcaaagatgaatagacgagcgatctcaccagtggtgtaactcagaaacttctggtaacgaggcgaggaaaactctgatacccaatgatattggcctcccgatgtgggtgccctgttggagaaaggaaatgtgagaaatctcagaaaatgaggcacataataactcacatcgaagccatctcggctagcgaaacaatgataaagccaaacccaacgaatgtccacatgtaagaccagaatacaccagctagtccgccattttcgagaccttgggtgtttgagctaaggatgaggcgattagcagctgataagatggcccaagagactgcggctcacatgagtataaactcccaggtagcttgaaggaccgctgaaaagctcaacgctgcaaggggtcgaaagttgcgcttcaaacatgtcagtgacagtgtcctgattgtgtcacagagaaagaaagaagaccttcaattcctggatcttccccatacgcgtcatatcatcctgatcctgtggactgccctccatctctggtaaatctttcgtgggatgttcttccatcgtgtgaactctgtcaaaagaagagattcgattgtgtgattgtgggctttgcggtggcattttgacaaattggacaagtccgaacccacgttgacatatcaatatttgacttacagaagagccaactccaaggttagatattagtcaacgacacaaactaacatttcaggattggaggtacaaaaatacgagacacttggctttgccaaccgaaggcaatctcggctgttccgctgcaggcatccccagtagtgatacaacgagtcgactttgaagccgaagttctccctccccaccattgttacatacccctcgatggacgatgaaatctaccgataataattcacaccaggccacatggcaaggcctccaggaacagccggaccggaatcggcataacattttgtgaacgttggcactgccctgaagtgccacagcgcgtttcgacgcatatctggtcgggtaggaccatttttcgctcgagtggactagttcatcatccctgtcaatgactgtaccgggttttctgcaatttattgcccgcgtactccgtactctcgccaagaataagatgaatcgaatccaaccccattccccggatgccggcataaatcgttgtctggacggaattcggtaacgaagctatcagaacgccactcgctggtttgttcagctgccagccttaatttaatgctccattccggcttctatctgtatcttcccgcgtcgatgcaggaagggttgaattccgggctaggttgtacgaagaaatgggatttggaagtcgttccgagcttggttggccatgtcagacgctgccactaggcatatatctgggcaataccaaacaaaggcgcctcaaataaatgacatggcgcaaagaccaaaatcgagaactgcgagagtcccactgtggcaagtctttatttttagcgtcctgcgcgcaggctgcgtctttccctgtccgttgcgattgcaattacggcaaacgagagtgagctacacatgtactccgtattgtgttgcaaatatttctagtatgagttactccattatcttactttgttgtattcggcacaatataaatgtaacagtgaaattaaacactccgagtggccatagcccaccagacacatgcttgatcaccaactcgaagttcatagaaccttttgcatttacatattcgactggatactcaaacagtattaggcctgagaataaccttaatcatgtgcctgtgggaatattaagcgcccggatgatctgcaaaatggcatgttaaataaatacattgaccccgttcactgaatgcatccatatctaaaaattacccccgatatatgatcccaccaataggcacaattagtttgaatctgttggaattcggtagcgtctgttgaccaccagggattgtgatatctcccagaaaggaaaccacgtattccccaaatctcgaatcaagctaataatacgcaacttgaaaccaacagtacagtcacagcgcatgtcccggtggatcagccaatgcactaaggtcaaatctcagttttgatacaggctggagtggatggagatctgcgattcgtgattagtatgccctgcatcacagtgtaaatcccctgagtcagccagtcagtttggatcaagctgaatatatccttcatcgagtccctaggaacagatcaggacatgtttctttcttttggccatggcaactctctccccagtgccgcctggcttgacacccccgctgacagcggatacggaaataaaccataatggagtgattacagtcatcgcgtccttttcactatttctggtccttggatctctaggcattcgtgtgtattctgcatacagtagaagagtccgtcagttggatgatttgactttcgcagcgactgtggtaagtctttccgtctcaactaatgcggacccttttagaagactgacgaatctagattcttgccttggcacaggtatctgtggtttttgtggagatatatttcggctggggaaagtcaaagtcgctcatcgctgatcaagattggaactcgatcgagaaggtaggtgtctatgaccaggatgctgtatcatttttgacacaatgtccttctaggttggatacagtgcagatatcctctacattgcaatattatcctcatcaaaagcgtcaacggcgcttttttaccggacgattactctacgtagctcgctatggatgagctatgctcttctctcggttactctactctgtgcccctgttactatagttttgctggcagtccgctgtgatcgacatccatggcatgatatcaataaccaatgttccgccttggtaggtcacaatacagttagtactatatctctactaactactagctgtctagttccctcactggcaagccgtcacagctttggatatcatttttgaaattgtgctgttgctatatcccatccgggcaatcgtgcgactgcatacgacgatcaacaacaaagtcgttgtaattctggtgctcagttgtcgagtattgtatgtttaagctctcactctaccagtttctacatactaacaatgggcatacttgcagccttatccctatcagcgccatccacctccattacattcgtcatcaagtcaattcatcagatcccacactcgaaggaaccttcgcgaccgttgttgcagagctccacgcggcacttagcgttcttgtactcacagctccgttaatgaaaccatttatcgcagcctacgtcgacgagaatggactagcctataccgacgacgcgtctaagtcacgaaccaaccagaagctcacacctaactccaaccgatcgaactcaacatatccttcgtcgcgggtgagtaattctccagcgaaaaatcgcatcatgaagaggattgacatatcggtggatcgcgaagatgtggagcttttggagagacgatgacgccctcaacgggaggcccgagttactatacacttaatgcattcacctgataggacacagtcacatcgcattatgctcaatatctgccggctaagttggtctgaatgaatatgggatcaggctgtaatggtttagcgcgtagagtgggatcagcacccattccaatacggggtaacagccagatatatccactttaggtgcgatgagtctaactcggatataatcggacaataccccatgtggaacttgataagggcaacgttccagtatcctggtgatagcagaagcgaatcatggtctcgttaacacgagattataccactaaatcgatcagcaagggtagaatctccatatcgggatatgaggtggcggaatcaagctaaaccaagcgtttgcgtggatcaattgcgctagattcggcgttttctagtgcacgccattgctctggccactcagtccagttatagatctttatctcaccccgcgaataagttcattccaggttatgacatcatcgatctacagtctccgaacttatcattctgttctctcacatccaggcactggacttttatcttttctcctgatcgctgacagtgatcgcgatcgctaaaagctctgaacagcgaccccagccggtgcgatggcagattatcgccattatcctctctcaaatgacgtcgacaacaggagttatgctgcagagaaagaagaggagaaccgatcgggggatgtgatctctcacctcgcagacccatttggggatgaacatgatgccgaaattaagtatcggacgttacaatggtggcaatgcggcatgatcatgatcgcggagaccgtctccctcggtattctgtctcttccgtcggctgtcgcagtcctaggtctggtgccgtacgtttctactacctctgatgcacagaataggaatccgctgactgctttccagtgcgatcattcttattgtcggactcggtatagtcgcaacgtacactggatatgtcatcggccaattcaaactcagatacccgcaagtacatagtatgggagatgctggcgaggtgatgttccatcctcttggtctagctcgctttggtagggagttcttgggaacggcgcaactgctttttctcatatttgtcatgggcagtcatatcttgactttcagtgttatgttggatacagtcacagaccatgggacttgctcgattgtatttgggatcgttggcttagttgtctccttcgtttttgccttgcctcgaactcttcgcaaggtttcgtggttctcgtttgcttgtatgtatatccaaatcttttcagaaccagcccctttctaactctcacagccttcgcaagcatcattgccgcactcctgattactatgatcgctattgctatccagcgccccggtgatggcaaagtagatgcgactacaacagtcagcctgtcaaaggcattcttagcagtgacgaatattgtatttgcttatggtgagtactaatcagctaccctgaccttgaaactaatctttatctagctgggcacgtggctttcttcggctttatttcagagatggagactccaacggactatcctaagaccctctacatgctccaaataaccgatacgagtatgtatgtgatagctgctgttgttatatatatctacggtgggaaggatgtgcagtcacccgccctgagctcgacaaagccaataacagcaaagattgcatatggaattgccattcctacggtgcgagcctccagcccatgtttgatttatgcagcatcctaatgtgatattatagattgttatagccggtgttatcaacgggcacgtcgcatcaaaatacgtttacgtccgtcttttccgaaacacaaatcacatgaagcagcgcacattcctctcgatcgggtcctgggttgcgatcagtcttgtgttatgggtgatagcctggattatttcagaggcaattcctgttttcaatactttgctgagtctgatcgtaagtagtcggggattgcatgtgacacctactgacatggattcatttattagacttccctttttgctagctggtttacctgtgagtgatattcggtacacaaactgttgataatgctaacctagattaaagatggtctgagtggtatattctggctgttcctgaatcgaggccagtatggggcgtcctggaaaaaaatggttctgactgttgtcaacctggtggttatcgggattggtgcttgcttggtatgtcaaatttcacaatgctcagacatttttcagactactaatattcatgaagtgcggcatgggcctttgggtttccggtaaggcaatgcacgatgattccagtggtgccagcttttcatgtgctgccagaagtggatgaaccctgatgtcctgatgttcatgaatgtctgcaattttttacaggtataatttggctttctttttagtgaatttgaatcattaatatcaagatcagtgttattctcggcctgcgtgttacttacatttaaatcatgtgttgttcgtgtattcgaatgatatatatccacctccaaacatccattttccgaacaaaggactgacgcaatattgaaccgcctgaatatgtactgagcttgtcgaacttccattcgaaaatacgcaacgatgtcgttacctacctacatcatgcatgactcagcctagcgtcgatggatggatgggtgccatgacgttttgcaagatcaaaaatcatctgttgttttagaatgtaaaaaaaagacacagatgagttcgaatgatcgatttctacgaaactggtgtgcttgcatatatgaacgggctcatagtgagcttctacccagtgctcaccctcgttgctaatatcagcaacgaaccactgccctcaattatcatcctccgttgaatacgcgagtcagattatttgtgatgcccagcaaggaaacccaaaccttactgtcctcgcacagcaatcaatcagagcgtgaatcaactagcttgcagaccgtgttcgacgatggcgacacatacgacgtggccgatgggttggaaagcaacgggggctcttcgaaaatcaagcccgagagatctccaaatgagaaagacaacctgatagtggactggaacggcacaaatgatccagcatgttgtccgattcccctccgagtatacaaggttcctctaatacaattttaggagaagcccaagaacttccccacgtggaggaagtgggtgatcactatggtgctaggaatgatgacactctgcgttacttttggctcttcgatcttcacaacagcaacgagacagacagcgacaaagttcggcgtctccatggaagtcacgttgttggctgtcagtttgttcgttctgggcttcgcctttggccctatcatctttggccccctttctgaactgtacggccggaagctaccgttgtttctgggcatgttcggcttcgcaatcttccagattcccgtagccgtagccgagaacttgcacactattttcatatgtcgctttctgggcggaacctttgccagtgcacctcttgccattgtgagtttatttcattatttccaagctgcgcatttactttcgctcactgacttcctcctccttaggtaaatggcattttggccgatatgttcgagcccgtggagcgagggattgcaatggccgtcttcgctgcggcagccttcatcggcccggtagcagggccaatcgtcggtggattcataacaatttcatacctgggctggcgctggacagagtacattacagctatctgggcatttgctatctccagcatcgggatcctggttgtccccgagacgttcgagcaaactttactcacacaacgcgctaagcgacttcgcaccaaatccaagaactgggctcttcatgcgaaggcagaagaaaaggtagtcagttatcaagatattgcagtacaatatctcctgcgcccgttccagatgcttgtgcaggaacccattcttctgcttattaccttgtacatgggtttcatatatggctttctgtacacttgttttgtggcctatccggtctccttccaagaacagcgtgggtggaatgatggcattggagcgttgccgttcgttgctttcatttgtggtgtcttttgcggttgtttgattatcattgcattttcattgacgcggtatcgaacgttcatactccgcaatggccgagttcagccagaggagcggttgattcctatgattattggaggtattttgttgcccgtggggatgttttggtttggctggacgtcagatcctcacataatttgggttccacaagttatatctggggcattcttggggtcgggggtattattgatcttcctgcaggtattattatccctattggaagatgaataacattttacaaatacttacgatactcgccaggggctgacttatatcgtcgatgtgtatccgatgtatacaaactctgcaatggcagcaaactccttctttcggtcatggctgggggctggatttccgatgttcgcaccaccattggtatgtcatgtccctctattagcggcgcaattcggctaaccgcaatacaacatgtagtttcataacttgggcgtcgactgggcgatgactttgctaggttgtctgaccgtcgcgttgttccctgtgcccattgcgtttttcatatatgggccgaaaatacgctcatggagtaggtttaccatgaaggaagaatgaaggtagagctgtgagatattcagggccgatcgagcggagtttcatcggacataggtcttatatcgtgatatctgtgactggtcaatataggatgttgatatagactgacataatattatcaagtgaacatcgcaacatcttagtattcgcagctctagaccggaggagttatcaggccctttgtcgttattatgcaatttgtatgaccaaagttaacgagccgttactccgaacatccgtctcggctagaagttgcaacaaaaacgacaaatatgtatgacaagcagttcgtgttatcgcggcccgaggcataaatagtcgctaaaatctccatcggccatgtccgatgtggagaaaactgtcgcatacgaaagagcgaccttgatgctacacggtcgagccaatccggtagtggaaaccttaccccagcttttcaccagcgccgcagagtttcagctaagctcaatggcgcaacccatgcagcttgaatcgtccatcaccacatctcgtgagggggaacctggggaaaccaagacttttagctaatattatcctcccgcttcatggctctcgagcatttctactccactcttctcgaagacttggtcttcggttccacactctcgccaatgggagctgcgcttcatcgatccggtctgcgccgccccacgcactgctcggttccaccaatatcacgatcgtccggtgggcggcgttcgccgtccagtactcagatgagtgtatatatgatctttatatccaacctcgtatcgatttggcggggaaatcggtgtggcttgacctccaaaccctagatcttcaattcgtctctatccgataccaatattgcaccatggcgccatattttggcctccgtggcccttcgctgaatagggctatcatgtggttggtcgtgtgtccggccttcgtgacttatggatacaaccaaggtgtgatgggaggtctgttgaccttggaatccttcgccgagacctttccgcagatgaacactctcactgcaaccgccgcacaagagaagtataactcgactattcaaggtaagcttcatcactatacctggggcacagatcggtcccaggcccttggcacaccacttggcctgtttctcatgctgtatacttgcaggcacggtagtcgcactatataccgttggtggaatttttggttcactatcatgcattcaattcggtgacaggctcggccgccggaaggtcatcctgttcacctccttcatttcgataattggcgctgtcttgatggcaacgtccttttcacttgcacaatttatcgttgcacgactcgtcctcggatatggaactggcggttacgtggctacagtacccgtctggcagtccgagatctcaaagcccagcaagcgtggtgctcacgtagtaactgacggcatcttcatcggtgccggtatcgccttctctctctgggtcgacttcggcttttacttcgttaagaccaactcggtttcctggcgattccccttggtcttccaggtcctgctatcactaatggtcatgagctttgtgatgctcttccccgaatcgccccgatggctgatcaaaagaggtcgcagcgaggaggcgcgcgagattttggcggcgctggacgacgtcgaccctcattcggaacagatcactctcgatattcgcgatattgagacctccctagctatttccggaaccggttcgtggaaggatatgctgaagatgggcgagcagcgactcttccatcgcaccgttctcgcctgtatgggtcaaatgtttcagcagatgtgcggaatcaatctaatcactttctacgccacgaccattttcgaacaatatctcaagctctctcccatccagtcgcgtgtcctggccgcatccatgtgcctaacacagccgctgggcggcctgctggcctattttaccatcgaccgtctcggtcgccgcgtgctcatgctgtggagtgctgtcgggatgtcaatctctatggccatcctggctggcaccacttccgtccaagataacaccggcagcttggtctgcgccgtcgtgttccttttcgtcttcgaattcatcttcacagtcggatactccggcttgaccttcctgtacgccacagaggtcgctcccctccagtgtcgagcatctatcagcgccgtctccgcggccgccgtctggacttttaacttcctcctcgctgaggtcacgcccgtcggcttcgctaccatcgactaccagtactatattatcttcgctgtgctgaacgccgccatcgtgccgactgtgtatttcttcttcccggagactagcggccgcagcctcgaggaaatcgatgagatcttcttgcagtcgcgcagtatattcgatccgcctcgcattgctcgctcgcttccccgaatgcacgttgccgatcctcatgggttggatctcgacgccaaggatgttggaagcggtgatgaggccacgggcgagaagcccaaagtgtaaactattcacgaatatatgaaatgagggtgctgcttgtttagcgggatatgtaaatagaattcccgaccgtgtcccttgcgaccggtcattatagacttatcaaatgatgcattattttggttgattattttttatctttcatctatagtgaaacaaccggtagattgacgtatcgatccgatgatgcgaccggtgtttcgctcatacttggcgccgtttcaggctatgctgcagagtttcgtcattagacacaagaatccttatttccgtgacttatttggagagacgccttgtcgatcacatgcaagatatcaattgcgccaatatgggatatgaataacgtgaagaaaaggaagaaaaattaccaggttagagggcgtttgaaagtggccaaagtgacatccgaaggaatctcaccagatcccgcattagtgattcaaacaagcccggtttcatgatctccgtggtctccgtgttatatttggcgggtcttgtctggcggtacaggtatataacagcgtttgaaagggagtcattcgtgcttggaaacaatacggtcgcgatcgcacctcgaattcgccgagtataacacaaactcacgaacatcgaccaaatgtgttttattgcatggctcgtcgccctctctggagtagccgaagcgggcgaagtcctgtggagcgggttattcaacgcgtcggcgacggttgccgactttgacgaatgtgagtgagtttcgcgagttgctgtcgattggtactgacaagcaaagggtcatggtctaaccaagtcggcgcttggcagtggtatattcacgggacagcatccacggaccagtatctgggtctctcgcctgatcacaagaacccggccgataccagtgatgaacagggcatccggatcacaatcgtaggtcattttatctagtctgaaggacgagaagctaatagcagtcaggatggcacgtcgttctggaatggacaaactatggaacgatccgagatcattcctcagacaaaggcggatcttgggagcgggcatctgttctaccatttctcgctgaagacagaggacacgaatgcaccaaatgcgagcttcgagcatcagatcgcgttcttcgaggtatcactcccagttccacggtatagaagaaaccaacagctgacgattttccgaagagtcatttcactgagctcaaatacggcaccctgagcggcgcttcgggcgaagacaacgcgcttcgttggtacgtcggtggggtgtcgcactgggaaaccgacctgaaagcagggcagtggtacaacttcgcgtacgatatcgattttgacgcgaagactgtggggctgtgggcgtcagatgggtccgatgacctcacgcaggttgtgtcggctgtcagcgcgtcgacttcgacaaattccgcggattggcatgtcggcgaattgaggctcgacaatgggggcttggatgcagctgccgaggattggttttggtctggcatctttgtcgaggaggctccgatcacgtctagtattgcaggtcctgcgtaagacgtgacttcaactctatttggaatgcgttgtttgatcgtattgcaatcaagacaaactacttgcaaacatgccaaacctgtcaaacagccttggatttatgaggtcatacgtcgaacaggacaccgcttttggaataactctggaattgatctcatgaactatgtcgtcgtttgaattcgtttaaaaagtacaaaaaaggtttttaccgcacagtgtatccaccgtcaatgcgcaaatcgttgcccgtcatgtagctgcttgcatcgctagccaggtaagcataagcagccttcagctccttcgcatcaccattgcgacccatggggatcatagagagccaaaggttctgaatatcctggggaacgaaatcagacaacccggtgtcgatgtaaccaggcgagatgctgttgacgcgggcaaagtcgcgccattcattggccagcgaccgggcaaggtgaatctcggcggccttggcaacgttgtatgaggtctgttcctgggggtagttgacaatgtggcccgacatggaggcagtaaggaccaagctgccagttccgcgctccttgaagtgtgcgcccacagccttggcgcagtggaaggcgccgttcaaatcggtgttgatgaccttgttccagtcctccactgatccgtctaggatgccgctgtcggctgtacgcccggcattcgcaatgaaggagtcgatcttgccgaaatctttgatcacctctttcacaaggccttccacgctctcccagttgcccacgtcgcactggtacagcttgaccttgacgccgtaatctgctgcgagttcctgggcgttcttttcgccgccctcccggcgggaggagtatgtgatagctaggtcggcacccagctcggcgcagccacgggcggcttcaatgcccatgcctcgagccccggaggctcccgttacaacgacgaccttgcccttgaggctaaggaggtcaaggatgtggttggctttggggacagggataggcatattggtaggtatagggtttcggtttggaggttgagagagatatgctctggtagagggtttaggtttttgagggtataaatgagaataggttttgagttgttatagcttattctcgacggatatcaagctgggcttatatatgtctacatccctctaatgacttcatggctctcgctctgacatgagagagccctacctgggcagccgagcaggtacctcctgtgcccggcttcatcaggttatgtggcttgctttttccaacttggcatatccaataatatcatcgaagggcttcgattatgacaatgttggtggagaaatttggcggggcagtgacatcatgagccgatctggtaagccgggagcagcccgaagtatcaacttgtttgatatcattgagtttttgagattggcaatgacaccggagttttacgaaccaattccaaataattctagaggggtctttcgagattatcgctcgtcagagcatatcgaagctatgagatgccaaggcggagtagcattgtcaacttagaagattccgaagtacaacggtactctggcaatccacgggagtaatagagtaatacgatagtataaaagtataaaagaaaggctgtcgacaaagccgtcaaaggccatcaagtcatgacggagacgacaaggtgcagcgaattagaactgcgagccattcactaagaaacaaaagtaatcccccggccacttccagacccttgtgtaggaaatatttccccgcataggaggtcaaggcgaagaatccctgccagtccagtccgtatacatcgattgtagcgagttccctacaccataacaaggccggactcttgttgtactattctgtatataaccttagaagtccactgcttattaaattcactatttaatgaacgtgctaagttgactcgcatcatacttaattgcctaggctttatcccattgtttagtagtctcactgcttcggctcttgtgtcttctcacgcacaagaccctcctgcgactcagaaggccgaaccgcatagggatcgacaacaacggaggcgaacttgtttgccttgaccttggtagcaaacagaatatccagttccgcataagtgcgacctttagcctcaggaaggcggaagaatgcccagatgaatgcaacgagtgccgtggcaccccagaagaacccggtcttgccagaagcgttccaggcggtcgggttcatgaaatatggctctagcacctgcgacaccacgttgatgatctggtatgctgtgcgcgcgtggcagactgtcaacgggcgcaggcgcacagatgatgtctctgatacaatggcgtatgcgatcgggccgacagtcagggaataggttaatagccagaagaagcagagtccggcttgcgcccacataatgccgttcgcggatgatgccacgtccaggataccgatcaggaagagtgttgcacaaaggattccctggccccagacgtacagcgtgcggcggccgaagccagtgatcagccaccaggagaaacaggtcccaacaaaggcaatggctgtgcacccgacgccgagttggaacgagcgagttactggcaggccagcttgagtgaagaaataggtaggtgaataggcgaatgtactaccggacagaatctgcccgacgaaggccatgcagcagatctcggtgcggtgcagatcaactcctttgaagcagtcgtagtaggtggtgccagctacaatctcggattcgagcttgatcgtgtgcaccatcatcgccagttgaccgttgatctgctcttcggtcttgctgccgcccagtcggcggatgttgcgctttgcgtcttctagacgatcgtgccggacgagccaccagggactctcgggtgcgagccaacaaaccaccatcaaaggaagcggccaaatccattgtaggccgaagggaatgcggtagccccattggtcctttcgttcgacgagtccgtagaggactccggatgcgatgagctggccgatggcccagcacaagttgacgtagatagtgaggtagccgcgcagcacggtggggcatacttcagatgcgtaggccggcccaatggtggcgaacactccccatgagagtccgcaaaggatctgaccggtcaagaggactgccgcagagttggcgaagaacgtcatgaagatcaaggcattgaggaatgcaagggcgacgaacattacaattcggtaaccgtacttggaagcacagtatccgttcaatataccgcctgtgatcatgtcagtgttcgtcctgaggtggtagtcgacagggaaactcaccgaagatacatccaaccgtactggccatgttaaggcccgtctgccaaggtgcagatacctgccatctgatagtaccgccataatcttttccatacttttgattgaacgtggggtaggcgaagaagttgcccatcaggatggtgtcgtatccctccatgataatagacatggatatcaagacagaccacatcacagccttacggttctcgcgcaaggcctgcatcagagtctgcatgtgctcatcgtcggtagcttgcttggcctcggtgatggcaccatggcccagtgtgtcttctacatgattggcggcggtcttttccaccgcaagtacagtatcaacagcagatgccatgatgggcaattggacacagatagcggttgatgttaaccagctgtgctgtctcacaggatcccatcaagtctcataccaggggggactatcatctatatacaattcgcgacatctcagctgccaggacgatccatatttgcattagcgtgtatctgaggttgtggagaaaggaaaggtaattcagcgccggatcaccagactgcggtcagcccacctggcattcaggctaattgttgtgatggatagagtacggagagacatttctgagtcgtgcaatattcctgtcactgcgtctagaccaactctggattgtcgcacatgagggcgtgaaattcacacctatcggcaggaagaatatcgacaggggcaaattctgggattcaattcagccgccagtggtctttcctggggaaccgaggtttgggaaggcgatctgattggagaccacttagcgctaactccctcgtaatgtagaaaatgaagctattcccttcctgtaacggggaaaacggccgcacatacattttagggaggaatgccgtagtaaatccgacccttaatcaagcctattttccaattggaacaataatataacgaaccctgaacggtgttttgggccgtagatgttggcgagctccctgttggaatggggtagttgctctgggttggatcaacttgaaacttccggtcatccttcgcgcctatatttctttatgacattttacgttcaatcttccgtcttcaatcttcccaagtaggcgactcatgagtatggttaactcctctagccaatcagaccagtgtggtgatccaaaccaagtgggcttccacgggtaataccggtgtagatgtgtagtcttacggcagattttctgacaaggtgtgtaaacaagctgaattcgatagctgtatggagtgcaattgatgcacagtgaatgatgaaagtgaacaaataggtttggttgaggataattcaggcaggcgatcacagatctgatatgttaggaaggtacgatgggtaaccattccctcaacctcgagatgccaaggtatgtgctcgtgttcgaaatacgcggcatttcactgatctatgtcgcacacgacatgattttccttaccgccaccatcacacattagaatctcaggctcagaagcggacaaagatggtggaaccttgatctcgccgactcaatcactctctacaacagatcgacagctgcctggaagaaacgatctctttgtcggctctttcggcctttaccacgataactagcccttctgactcgtcctcaaactccaacctcttggcactgtgccagcgatttcagcgcgacgcagcgaaaccactagtatgcatatacgggggtataataacaggaaataacaaaaaacccaacagcaacaccgatgcaataagtcaacgaatacccaactcaactcccatcaatccgaatcaacgtcctaaactcattgttccgaatcctcgtctctggaatcatcaatcgcataacccaataatgcttcatatccgtgatgctcacatccctcccagctgagtgcacactccaattcgtctgatttttcgatccgagaaagacgccttcgactggtatcccacgacggtagtgtctgtatacctgtacaggctcagcgtttggtttgccccagacgagtcgtcctgtactggggtggtggtcaatccccacggcgtgccattccaaggcgccggcaccgggaccggaaaggacgtatgcttcgattttgttcaggacaccgttgcagcggagctgggttttgaggttgttgttgtcgcttacgattgtgatctaaatctttgttggttatttgttccccttcgtcggttatgttttcatgtatggaacaagtccatgcaagggtagcaacttacaaatccatgctcgatcgtgttgggtctgtcttctcgtaaacgtatgatatcgctgccagtctcaaagccttcgatgctgcataaccctcgagtcgcagttccattgtagcagctgtcaactttgagtgtccaaggcccggctatctttgtctcgttgttgtacaacggtagctgtgagcagtctgtgacggactcaatgaatggccctcgcttccctggatgtgcaccagcgagtagaaatagacacgcgaatacaacactggtgatcatgatgactgtaatgaaggagagtacaaaagaacgctgagtgtttgccatgttttcgtacagagaacgtgaatctttatatttctgccttcacggcgccatgttacattcattttcaatccgtcttctaagtgtaacagctctgagttcaatccagacaccgcggttctctatttctaggctgcaactaaccaagggctggtgttattgatatcagcccacttagcggccaaaatagacgatttcgcgtttcacgattggtggcgagctgagcttctagggcttctttttccaattgaaatgtttcattggacatcaaactcccttctccacatagtgtatccccactgcgatcaaaaggcttgacttaaaaagaccctgccgtgtctttgatctattttggaccctggaattgagacactcgctagaattttcaaaataccgttgcattgctcgccaaatcgagtttttgttgaagggtttgaaacccatcattccaagtctcccgtccattcccaacttcatatatattcataatctatgtcataaatatctcacgatatgttctagtatacagtctagtctactcacgagcaagaagcccttcggcttcctgggcgtactcggcgggcccaccatgtgacttgcccagggtttcagccatagccaaaccttcacgccgacccttgtccgcattaaccatccacacaagggggataggcagaaggatcagaagcgccatgaagaaaaatccacttcggatttggccggtcgcatcaacaagaacgcccacaatagccggcccaatgaatgagctgcccttgtccgtagcagcgtaaagagcgtagaacgcagcctcgctaccgggtggaatcatgagtccgaagaacgatcggcagtatgatgccagtcctcccgacacgactccgtggacgatggccagcgggaatatctcccacggctgttgtagcccgaacacaccccatttttttatgaaggggatgtaagcaagcaacccatagagtggtatcatctcaaacatgccaatgcataggatgatggtttgattcggccgtaggccgaagtaccgagatacatgtggccataggaatgcgcccgtcatgccggacaccgtcgcagtgatggagagaagtccgatcagcggtgtgctcagtttgagttccgtccgcgcgaagaggatcgccgttgcagagacagtggccattgcatcggagatcaggaaccatgctacgaggaacatgaggacttcgcgcagtttgatgactattttcacggtctcccatagtgatttccaggcaaaaccgatcagtcgtagccaggctcgccatcttgctgtgcctttggtggcgactgaatccaagggaggccccggtcgtgtcttgagcaaattacgagtgaccaaggtgaacccgccccaccagatgccgaccaggagcaatacgaagcgcatgggaagagtgccagacactttcacaagggaggtcttggataatgtgatcagcaggatgatactgatgatttgcacaaaaaccgccgcacaatatccaagaccaatgcctgtggaggagattttggtggaaagctgcagctccggggaggacgacggcggggccttggcccctagtccaccttctagtgagctccgtggctgctcttgtggctgaagtccgtctaaactatcgttgtcggcatcatcgctgccccaggcgttccattccgagttacctccgtctcgatcgaagctcgacatttccgcgctgtcatccgcctttccctcttgcagagatgggtcgttggcgacaagcacagggagataagagttcagcacaacaaaggatgaaccgaggcaggtcacaccgatgacgaccaatatcgatccgataatgaagataggcggcgcaatgaatatgaacaacatgctggcgagcgcaccggcgaatccgaataccataagtaatatcttgcggttgttctctatacatccaattggacaaatttgacgttaactcatgtccctctttcgcaccaaacattctcagtccggcgttctgcaaccataccgtaatccgccagcgcgctgaacgatatcagtgtcagcgcctgtatgagtaccgctagcgagaaggtgtacatggcgaagctagctgtattgacctcggcgccaaagatcggcaccacacattggccatgctcagcactatttgtgctgttccctgtggatggtccgacgcatggaagacggctcacttgcagggtgccgcgctcgcgggctaattgttccaaggtgagcggtaggaaagatcctggtggcgatcgataagtaattgattattttaggtttgcagatatgtcttcacgaacctacgccacagaccgcgaacacctccgccgcaatcccgtacgagtaccatcctaggatctcccggcggctcgttggggtggtatcttcaccggcataccgtggtggtcgctgctgtacgccttcctctggcgacgggggccgaaaggcagcagatatataggatagcatggagaaggttgtgtaaattctcccccaggaatccacaaatttacaagcccaggtacgcgcggatgcgggcggaagagccccaacgagcaacattgttgatgatgtcatcagatcggcaggatatacgcctctttgggaatgtcttcattttctataacaaagtatatggtagatactccgtacactgccctataaacatacaaagaagagccataaaacgatgaaacacaatatagcgcatgatcctcggaataaaagataacctgcccatagaacgggctgaatggcgatgagttcatccgaatcccgaatcgaatatatatatctcagaaggcctttgagcctgtcctctcatgatatatttccgatatctctgcgatctgaatcgatatcctctctaggtaggactgaggcgcaatattactaagttcggcgacgtcaacatgcagtcacatatactacatatatttaaccaggcaacagagtagtgcacaacgaatttcacgattatttcaaccagtcacccgtcatcatgcctgcttcggtgttcctccttggtcccggctttgtaggcggagaaatcattgactttcttctcatatcgaactacaacgtaacaacacttgtccgtcacgaatcagccgtggcagattacgccaatttaggcgtcaaaaccgtcgtgggcaatctggacgacacatcagtgatcaaggatcaggtcgcagttaatgacattgtcttctacatcgcgactgcagatcacttgtcatctgtccaagcaataatcgatggcatcagacaacgagcggcgcaagggctgcaaacaatatacatccacaacagtggagcaactttgctttccgataacgcccaaggagagtatagaagtgatatcgtctttgacgatgagcaacccgacgaaatccacgccctccccgattctgcaccgcatcgcctaatcaatctagtcatcgtcggagcagcccaagaattagcctcctacgccaaaatagccatcatgattccgccccttatctacggcatgactagtagggaacaccgcctgtcgattcaattgccgacgctcatccggtattctatcaaacatggctatgcgggtcagatcgggaaaggtctcgcagtttggagccagattcatgtcagagaccttgccagaggatatatgattcttcttcattggatagagagtgcacccattgctgagattgcgctgaatccgtacttcttttgtgagaacggtcaagagttgtcttggggtgaatgcgccgctgcgattggccatacactcaggaagacagggtgcattactaaatctacgccaaagcccattccgaaggaaaactgggatgatttgttcggggaatattctgggatggtactgggatcaaatgcacgaattagggcgaatcgacttcggaaattgggctggacacccttggagacggacacctttgcctccttggctgaagatgagattccaattatcgcgaaggagaccggggagttcacagggtatgcgagcgttgttgtgtcgtaactggaaccactcaaccgctgtgttttgccgtcgtcctgtatcacttgcacaagtaattaagactaaagacgtgctttggcctcgctcgggtactttgaattattacaaggcttccaaagagtaagatatgactgtctcaacggatttaaggatcgggagagaggcaaatcacaagttcacagaaaagggaagtcgagggacgacagtcgcacttgccgattccgggccggtatagggtaacttcccaatcgggctgcccctactcttccatgaaactcaacatcaagacttttgtccttccttcatcttcacacaaaaagacttcatatctgcagttctatcaaatccatgtgctatggcgattctacattatctcgaattcatcattggccggctactgtacccaattcgtggccatgattcaggccaaatcattcaatgcccggccttcaaagaccttcccgagcccaacatgaccctcgaagcacccgaagccggcccctcgggctctaaactacctctccactgtacttgcaaggccgctgatggcaagggtggtcttcctgaactgcgctggacagctccaagctgtcgcgaggaagtcaaggagtatgtactcctctgtgaagacctcgatccaccaatcccattccttgtctttcaccacggtctcctttgggctattccaccctcgaccacgaaagctgaagcggctgatgtccacccggatgatcacgccaagatctcccgcctgaccgttgctggttggcgctttgtgccaaacttgcttggattgccgtttgtcggcgctggtgcaccgctcggccatggaaaacatcgttacatcttcaccatcatcgcgctcgatgagtctctcaagttcacggctcccgagaaggtgacaaagaaagatatcaagcatgccatgatgagcaaggtcattggatggggacagtggattggcacctttgaaaagccctggcccaactaaatcatcatcaataccacttcttttacaaacacaactagtgtgaaagggacatcaggagcgggattgacgaaggagtccaaggtacttcggcagtgagtgtgtatctcattcccttacatttactagggttcttcatgtaagtatcgttatggaactaattccctaataacaatttatttttcggtcatgattgttttcaattctgttgtgcatttccaactaatttgtgcaatggtcaccagttgtagtccaagaaccctaggctagttcacaataacgtgtgtcatagctcacgtcagagcactttatattatccatcccagacacctgtttgcgatgttcccctgatgatgtcccaaatgtcccaatcgaagagcttctaaaatggtcagtcttgaaactcttcaaattctgtgcgagccagctgacacactgacctttaccggtgcaactcaacctatccggggagtttcgtgtcgtctattctgacctgctcattggtaaatgcagtcatgccaatccaataatttgccggaggtttttatgttcataatatctaccagctgggtgatttctcaacgattgtgtatatttatatacccctttgatcgttgcaatgcgagtaacagtcccttttggtttcgacttttgtcggcaatttccagcatgcgaatttctttacaaaccaactcaatcatcatcactcatctaacaattgctactactgagtgaccaccggaaatttagaatgctcacgagctctcgggttccattccacgtcttaatatacacacattttcaaccagcgatcactcaaaaattcgaataatcgactgcagccgacgatctgtctcatttgccatcaccaggtgccattttgaaggcgaggcccagtggagatcttgatggatgaaacggacaataattgacagatgagacagacagcggcgcatttggctaatgtcctcttctccccacacagaacaaacccccccttgtaccgaggtggtggccaatttggccctcaccttcaacgcccgtgccgctttctcaatcgccatgactaataaggtgagaatattagccctggcgtttgaagcaaaacatacttgacattgaaggatgaccactccctgttgctgcaccctttccaggtggagcaatattttattcggcccattcacctcctccgattgcatgacttcactaaatgcctgggcatagcaattgcagtgaagggaagaagcgtcttccggcagtgcctcaagatcaatatcttccagtgggagagattgactggaatcagtatctaccggttcgtgccagatttcactggagggcaagtccatgattctagccggattccgtactgttccggagacctgaattgcgttcggtgcgaggctgaacgggtaaattgcaccaccttgaaagagtgacccagactggatgtccggcgcagcggtgtggaggaacccttcaatggggggttcatcgaccatcaaaccgatgtgggaagtataacactgtgtggaatagtcaacacgcccagaaaaacggggacccccagaactttcgaatccgtcattttgttcaaacgagctatccgggctggtatcggaaaatcctggatccgcgcggttttcggcctcgtggtcctggatcccttgtccaatcttgtggtttcctgcgcgtcccaacggtcatctatcgacatctatatatactatggactaggtatgtgctcacctgcaacatccgagagcagatttgtgaaactcgaccactgaaagtttccctttggtggtgtaacttcagtgccggtgctagggtcgctcttgtacgactcttcccttgagctaggacccgagccggatgatgtagttggactcgggatccgactcgggaccctgcgcgccctttgcgccctctcttctggggctagcctcgtcggacggtcaactccctccacctcctttctacgcatcttgatgcctgtccctgctgctgccggccgaatcatctttctcttggccggccggcccaacggctgcgagattgaatagacacattgatacccatgactctcgcaacggtcacatgggtaggtgtggctacatcgtatcttcgcttgctggcaggcgttacaggttgtgcgcatcttttggttgcgaagtagttgaccgttggactggagagacctcttggtagaggtctcagccatgtgtaaattgtggaacagatgttgaaaggtttgtccgctcggactcctcaatcaacaagtatgattctccctggtcttgggccaacttggggtatttataattcatctcatgatgagttcacccacctctttcctagttgatattgaatgctgtcagcaacacaggaccacgtttgattgcactcccgcattcatcacgaaaggctgtttacccacaccacaatgacctccgtttacagcaattgccgaaagcacaagaagttacatggatcgaactttaccaatgacaaataaccttgtcctaccccccttgggacctgtgtgcgagtaccacgcttgtagtctgtgggggtgttgactgttcaaggatcaccaactttacctcaccatccatcagtgaacaattgaagtggtgacgtgaacttggggatttctttggatgctaattgattttagtaacgccgtcgtacggtattcacatttcatggagctaggatgcttccttacactagaatcaaacccgttgttgcacacaaaacagctgtttcctttctcgggcaacgtcctattctagttgctgcgtcgaacaactccagatggaaattcacggccatcattgaacaagaggcatgaagccgaactacaatatatgctagtcgatcgaggggctttcccataacagcggcatctatcaatcgatctgtctgttgacacttatttctacggcgttctcggagcatatgctcacctgataagccagttgcttgcgattcttatataggcacaacaattggtgcgttattgcggccttgacacgcatttcttatttctgatatgaacattttattacaaccatccacatctaattttctgatatactatacgaagtacgttgccaattgttctccaataatttggttgtccgatctcatttcaattttcgcagacaatatatgttccctatagtaaaagcttcatctttcacctcattatagctactattaccattccagataccaccatgcctgccatcaatccatccacccaccgtcaatggtggcggcagctaggttgatggcaggcatcgtggtaccaggaatcgtaatggtaggtataatcaagttataaacgaaccttttattgcttcgtataggggacatgaattatcttcagataatctatttatatattcaaaaggggaccttgcaacgcggacagcaagcgtaccgacagccctgcctgcgaaacagatgtgagagcatagtcgttactgggaataggaggggcgagagaggaaaacaccatagggaagtgaaaagtgtgcctcggggcttgtttttaatcctgtactattaccaatttaattatatggcgtgacttgattaaccctggtgaattagccctagctatatgatttcatggggaattgttgctcagacccccctgccttgaatttcagtaccgccttcctgatcgagtaccactcagaatgttccggccacactttattttttctgccatgtattctgcctacttctggtttacatagtaaaaaaacatgcattttgattagaaaaatcgtatatactacctgatttctataggaattagctccttgatgaatgagcagttgatgaagcagtcaacaataaagcagttggtgatgaaatagatagttgatacaagagatgacagaagtgactaaattttgttaggagtttacatacaagctgtaggtacctgctgctgtcttgctctatgtatcatatgcagttgaatacaaaaggaaggcggtactattcaggcagtgggcatccagggtgcaagcaaagattgggttagaccgctgtgccgacagtatcttacaatgtttatgtttccagataatggagagttccaaaaatagcaccttcgaaacgtggatcatattctcaagtctccttgaataaataatctcagtttccatgtccccatgcactatctcatgccaccaatccggctgtgctcgtgggacaatccacggaacggaacgaggtcgttgtcgcactgtcaggcatggtggttgtctctccctcggcaggttcatgtctgccaatgaaatagttcatagcaatgggagggctcaaccctgctgcctgaacaaacttcctgatatcgaatccggcacgtgcgctaatagtcttagggaacacatgtgcaaagcaatccggaaattgataggctgggggctgcgcgaaaaggagatagacgtaacgatgatgcgtgtttggtggtgcacgaggagctatgtacgaggctgccgggttatgtctgtccccgtggtcttttcctggaacgattatggaagggggtgacggctttgtacaatccatcattaggtttggctggtaccagtgtagaatgactgattggatatgggttcctggtaggatggcgtcgaggtcgatgaagagggtgatgtatttcttgttgcatccgaggttcttgctgctgatctcgggaatcatgctggcctctgggctgatgttaaattacttgattcaagccgttcgccatttgcatacctcggatatctaagtccatgccaggagtgatccattggcccccgggataccgtatttgcagttgctgactagggggcgaagggaacatctggactatgtctgttagaacaccaaagaggagtgcaagtggtgagatcatattgtgttttttagaatcaaccgaggagagtagttcgacaacatgtcaatcgggaatgcaatgactaaatcaattccactcggccttgtgattcaatttatagacccgctttccacaaatagtactatagtctcccgtgtatagtttgccgttgtgcatcagtttcggcttgtttcttgcgccattcccagcctttcatgtaaacaacacttaaaattggcgtgactagcgcaattgcgccagatacaaaacaatatgtccattggacaccaattcgcttgatcagagggttaactaaggctgcagcaccagctcccaggaaacaccgcacgaggttgttagcggccatcgcggtagcaggggtctcgtagtacaaatcaacgatcagaatgttcatcacgttatatgccgccgtgatacaaaagcaaattacgaagaccacagtaagggcaaccatgagtggtggctttaacggtatgagtactccgtacacgactattgagacagctgcaagtatctgaaaggaggaattaagtcaactaaccaactccaaggatgtctcagggcaacgtaccgtcattggcagaccaatctgcaatctcgcttgttcgataggaaatccaaggatgtcctgcttctggttcttgtgtaccgtctgaccggcattgcgtcgagaccgccggtaattccagtcaactaatactccgttgacagttgcactgagtaatgaccctaagcctgcaggaataaagcatagtccaatacccaaatcatctagatcgtagattctgtggaaaagcgcaggaattcccgccgtgaccgcgtaatagctgctgaagacaactccatttgctaaaagcaccagccccacaggtcggtggaaaagcagacgtagggttgagtatgggttagggacattcaagcgcctcctcggcacacttaatgcaggtggggtcatttcggaggtggtccaaaagtaactccacatggttcgattccatccgactgcagggctcgagccatttccgacaatgcctcggcacgtttcagggaagaatagcagcagcgggacgaagaaagtaccagctgcaatagcgagaaaccagaatattgcttcccagcccagatacttactcaacacacctccaagaatcggcccgattgaaggagcaagaatatttcccagggaagtaaagcccatgtacataccccgctcggcggacgtgataatatcggccgcgacagcggatgcaagggccacggttccactactgccacaactttgaacggcacgaagagctaagagtgctgggaagctgtgttgtagagcgagagcaatgttgccaaataaatatatcacgaagcaaaggatgtatgcaggtcgacggccagcttggtctgcaaatgaccctgttaacattggagagaggccctggcatatcttcaaactcagagaggtcagttattcgaacgtagtttgtagactctggttacttataacctaccatgtatgtcgtgatcgtcagattaattcgagatggactgactcccaagtcctttgcaatggaattcaatgccgggtagtagatattggccgataaaggcgaaaagctcgaagccagtgctgctgtcaaaataatgaggcgtttctgcgttggtgtgaagacggagtatgcctcggtgccagaaggggcacgcagcaagggggtttcttcatcaaccccatcgttctgctgctgcacttgatgaatatcttgatcgttcatgttggttcaaggtagaatgccaaacaaaaatttcacaggattccttctggatgtaatggcgaataaatacccgggtccttttgccgttaaatcaaccgtgaacccaatatcacagcatttcggtgaaggaaaatatatatgcattcaatgcgctcttacggtggaaaaggatcttatttctcgataaatttgataaaccgatatttttcaccagtcttcacaagaaaaagcagccaatgatatcggaataatcactctctcgttacatgttcgaactcttagatcttaggcctggggcccgaagttggctccgcatgacctgtatacagatgaataggtcgaaacagcttgccacgattgactagagcccgttagccaagataccacgccttcagtgaactggttccttacccatgtactctctccaatgtgccatgataccaataatgcggtgagcaagcattgccgccggaatcatatcaggctcgaaaccactaaatcaccgtgttggaacctgcagtcatcgtacacatgtcgcgagtgaacttacattccggtaaatacgaagttaccgtaaaagtccgcattgggatacaagccccgcgtactaaaaaactcatctttcgaagcagcctcttcgatcgcctcagcgactttcaatagcggttgattaacatcggtcatatccttgaggatactttggatgggacgcacgcgcgggtccattcccttgtaagtgcgatggccgtatccgaataacttttgctttccagattttatgtcttcaatgaaggctggaacattcttcggttctccaatgttacggagagcgagttgggctgactctgttgcgccgaagtgtaggggtccgtgtgcggcagccacggtagctattaggcaggacactgggtcggtgagagatgaggcagtaactactgttgagaagactgttagggccattccatgctcggcattcaggttgccaaagcggcggaaacaggacacgcgagtgggatctggtcggtttgtctttgggtctacaagaccggccatggcgaatagattctcgtagtaggtttggtggatcgatggagacttccagggaatgcctagtcggtgggatctcacggccccgaagaccacagcgtaagcagcgacagttcgtaggattatttggtcggcccgtttgatgtctctttggtaaatcgtcggatttgtggtcgctgggatcacatcgggcgtacaggccaggtaggctgaaaggcctgctagaaccagcggcagtgggctagtctccttgctgtgtatgtaagcgcttgttagaaacataagatggtggagatacgatcaaggaatcatcatacgggagattaacgatggtctggcgcacaatatcagggaccacttgcatatattgtgccagctgccggcgcaactcttcgaattgacttgctgtaggatatgttccccatagcagcaggtgaaacatttcttcaaagtcacacccccagagttggtctagggtataccctcgatacagaagtaggccgcgctcatgatcactaaccaccaatcagccagatatctcaagggcctttgtgtgattctcacgagaagctgataggtgattctgtcacggctgtgttttgcaatccgggatcataaacacgcaacccatgggcaacttggtctgcgcgattgctgttcagggaaggtgcccggatacgctgaaggtcggtcgcccgtactgcgtttcggttaatggggatctcataattcgcgttagtgcgtgagtcacggatgaatagaatgccagtcgacattttgaaccagaatactaagtaaaaatgaatttcggtgtcggagtttcgtggggaagtttcggtcaaatggttgttctgtttccttgtacgagtcaacgtcgctgattgctggccctgtcagagaagacatcacgtaaggcaacgtatgaagcttgccgacaaagatacacccggtacggagtactactggcattgaactctacatggtcgggctgtgtcagggatatgtttaactattctggaaactataaccttgcattcatcattatcactcgttataagcacccattagatgttttcttttctttagacagccacaacgtcccgcatttactccggcatgtgcttgaatgggtgggcaagggattcctggcagaaaggaagcttgctgaccgtccagatctcggtgtcctacattgagcgaggggtcagtcacactctggtgaaagttaaatctagccctaacttgtgacacttacgggcttcaagttcttcttgatctcagtatccaaagtgccggccttgatggcaatgatatcgggagcggcatcaggatcgtgagcgatcggggaaccacactcagagcagaagatgcggtggacagcgtggccggaggaacctttgccagcccagctcttggtgggacccttgatagtcagcttgtccttggggacaacagctacgagtgctatacaaagtcagcaattgtgtttctccgtgggtatttacgcaactaacaataggtcgagccactctggcgttggcagtcatcgcagtgatcataggcagtgaccaaaggagcgtcaatgtccacggtgtacgtgacggctttgcaaaggcagtgtccggagagaggcattgtgtatgaattgatggattgattcttccaaggtacttgtgattgaggacctccggagatgggtggaacggtatttaagggataattccccccaacattggaagaaagttgaactggtcatggtcattgatatgtcaagtcacgaatacctgctttttcctttgctaatgctggtgaaacaggtacccggtacctaccaagttacgtcatagctacgctgtgctttgattgagctttttccacaaaatccaccaagtttgaccgattcaaccagtttgggcaattcgaattccaaatagaaaggtcgttcgggatttcaaatcggctagttctcttttttggcccctgtcagcccaaaagctgcaaggcaatgacaaattattgtgccccgccagagctctatgcaaggctttgggaaatttacccctccacaaagactcaacttagcgtgccactcatatcaagtctcactcgataatgctgatcgagctccacaaatcaccttgacggtggagatacgacccgccttatccgacggtgccgactcggtctccttcgcattcggacgctctccgattcgtataactgaaagccacaatgtgtgttcaagctgtctcgagaacgaaaatcgcttaggcgccacaattgagcagttcaatcattcgcattaaagcgaagatatcaggtgataagtctgctagcaattagcacggcttacagtggagcatatgtgctagtgagtgagctgaagtggagaatattgtgagtctacaatttgttctgcgatctgcgttgtgatcaaccgctaccgacccagacgctagacagcagtaaggagctaggttcgtgatccggtgacctggtataaaccggtacatatttgtcagtttatgcaatccgggcaagaagctaaactcccgaggatctgtacagagttcgtttaatacctccgcggtgagctcgcttttgtactttcccaattctcatgaacatcagagaactgggtcaggcctcaaataacgtagacgatatcccagaaatgttcgttgtcgagtcagatgtcatgtagctttgggatctttcttgatttgtgtacatagtataagttaaagtaggtttaccaatgtgtttacattggtttgtacaatatatatgtacaactgttggttgtgcgcatcgctattttacatgacagtatcaaatgttatagctgccataactacctcgtcgggcattgtcgatcttgtccgctgcactctgcatgcgcctgtcagataccgtattcacaaagtttaaactacacttacctgcatctgagctgccattcctccccgaggattctgaccaccataaacactagcctcagcatgttgtgcgtcacgggcatcatctttggtgatatatgcaggcacatcagcgacggctgtgagccccaaggcatcattactgtcggcaatcgaccgaatctgggcagagatgtagccaactccaggtggttggttaaatgcacgtccctatgggaccttgcgttagtaattaatttgacactcaatactttcacgggaattccctgacctctgtggcttgaatctcctctgcatcttctatcgagatcgcgctggatggcttccgcgatatctccgcgaccttattttcgaaattcatctgtcgcatacaaagactctgggccgttgctataatcggtcagtcgtgcgttgcttgaagacgcaatagagtttatgcttaccagctggtccacctcgggaaggtccgcgtccagtcaacgcgctctcagcctgtgagatggccgaaacatcatcctgtgtgatgcgctgtcccctctcggcagcgagctggatttcggcgacggtaggaatatcaaaattcatggctgcgcgtatctaaatgacatttgtttttctatttcgcttgatctcacagcttgttgttgtactatatacttcgactttagagccggtgatgtcacggtgaggacatatcaatcgaccgaactttgcctttcctcgtcagtggtgggggcgttgagtatatgcagacttcgaatagaacattcgacgcttcgaccaaacagaaattgtggggggatgcgtgataccccaattttgccatgtcgccaggcccctagcacattattccaaatcatcatcacctcgtggcacgatgtctgcaggaccatgcacacttggtacaacgcagccatgattatctggagatctccaaggcagaacatattgcttaaatctcgttgactagttatgttttagtggttggccccttctcaacggggtagggcagcttctgagcgccgttcgcgccgttccatggacgtcctgctgcagattgcccctgtcagtgccaccgctaccaaacccaaaaaggaaagaaaggacgtcgaataagaatcctcaggacgagccaacttccatgccgcgtcaccatcgaccgctctggccgaacgacggcaaccgaatatccaaccacgagatctggagagtcccacgttgcgtgacatggcatgatagcccaatggacccttgtcatgagtagcacgcctccattaagcttcatgctctgggtggtgtcagacacatggctacgagtctaagtcacggcaatgtacctttggccgatgtctacgaaattgctcaaggcagtttaagatttccagttagcaaggggtttacccaggagctctgtaaaccatacgatagtcactgttgcaagaccatgtcccgcatgagacctcatgagtgagggtcgatggggcatcattccggcgtttattgggacggacccggagatcaatttgttggaattgacataaattctgtagtagtttttgggctcgtgtaagaagaattgtgcattgattttgacatggaatatgcaatctgatactcaatgtagaaattgccgcaattttctaaattagaactcttacaaaccatacttatgaccgaatatttaaaataaggagaggcatgtagctaatcccgtggtctcaaggaaactgcggtagtaatagatttgacgtcataggctcttgtctgatagtactcggctagactttaaaacccccaaattagggcagtcagttcatttgagaacagatcgagaaaattggaagacataccacgtgcatcaagtaaatctgacttagaacattgacactaacgtgggtaccgaagaaagtgtccgcgtaaattctttgcttgatgagtgacagccacaggtgtagcctggcaggaaccgttcagcaggccagctggtctaaccctctattttatttttgctttagatcgcgtattgatacattgcgatgacgtatattttcttactccccagttaaaccatcactttgagctacgtacataaagcgacgaacagtttatagccgagaacgctatcttatttcgggctacggtacctttcgtatctccagtcatgctttccagtcaggctatctcaatcttcaggcagacattggcaacttgacattcaagcttgagatcatcaaatacatcacctaactcctctccatccgcgaggaaaatgcctagctttaattttctaagattcactgaaaagttcacggcgcgcaagagtttcaaaagctgcgatgatagctcgaggtggtaatcaaacataatgtctgtgatttccagattcacgaggcaatggggcaagatttccgtaagtggcttcatatcccagttaagtatggagttatcgggagatttcatcagatgatcatgtctgactttaagtgtttcgaggacattaaagtctttaaaagatccgaaagggttttcaacaacatccttttcagcaaccacttgatctttatatgcatctccatagccgatgcgtagggtcttgagagttgttgtaaatggaagaagagccaagcggaatttcgaggcatcgaactgcttctcctcatcgaggtcatattcgtctgcctgtatctcgactctgatggaaatgtgctcaagatgtgtacacactgcgagccagtccagcataccgcgacaccagtaaccctcttccacagtaatatcctggacagggcacacgtcttggtaacttttgaggtccatatcttcatcttttttctcgcctattgcggttccgtagatcttgcggacttgagggaaataaaagaaaggctccacaaagcccgaatcaatccacgaaaccccccaggcaacacaggctcggacctcttttaagtgaggaaacggcggctcgtggtgaaatggctgctggcgtttcgccgccttgagcaggatttcggatacgaggtcggaatgttcatgctggaactcaagaattcggaggttggttagccggacaagaaataggcccaaccatgcttctccgcatattccctcctccccatgaagatgctctgtccacaattccttttgctcttgctcttccgtggtgaagatgtcttccagcgcatgcttgatgaagctttgcatctcgtcgttcatttctaatggatcatgctggtcacattgtgaccagcataggtcgagtcgatggacttgtctggcgagctccggttgtctccacatacgcatgattaagccgatgaatgactctgtaaaattgtccgaagatatgtatgaatacatcaaaggcgagaatagatcatgaaatcgtcgacaggtaaggcttagcgaatgcaaggtagactgagcgcaaccatcttcctgggcgtgcttcccaatagctagaagaagttcattcggaagtcgatccattttgaggaaatgtgcactctggtgattgacggccttatgaaaatcgtgtattaaaaaatgatgaccaaagtgacggagggccctttcatttaaatcagatgttacactaggcccttccaaatcgtgcgtacgttttctgtctcaggtgagacagtggatcgacgcttggcgtttaagactattgtcttcgcgtttttggatttcgataccgcgtcgaggctagatgtgcaagaggaaggaaacattggatgttcgcagtcgatcgaaacttttttcactttcgctgcctagacgataggtccgctaaccattacccactaatcagcgaagatctagcagggaagacgaactcaggattggacaccatgggagactaaacagggttttggactagcaaaaactaaaatatttaatatcagaaaattgcataccttattcttgtgtcccttgtctcgccgaacatgcaccaacgtatgccaagagatccaaacggtatgttcggtgaaccaggattttcttcataagctgcatctcaaaaactaatggtctaagtgttcagttggtcttttatctctacaagaagctatttgatcatctaagaaggccgatacggcagctgcgacatgaagagtttatagagttagtttatattttcctagctaggcaggtacaggtacaagctaaccggtgtttgagatataacagggaaaaaattacggaatttctgccgagtgcgttagacactgttcaaaggaggtttgcgttgagtgtataatattttggtacggtatgtgtggtgttaaaataggatatatatgtctgtagagtacaccctaggaaagagattgtttaagtctgttcatctatgcagctcacctagtatttatagacatgttttgtatactcactcagaagtgagatgagttgtggtccccttctatgaatggttccacggataaacacgcttcataacttcaggcctgataaatcaggcaatatgatcctatcggagtaactacgtaagcagaaatcaggtcatgtgggcccgcctaagacctcacgttgatacccctagtttaggcttatagaaatgctggaaatgtacggtatctttgtgattagatcatcccgttttagtatgaaatatatggtatatttacaagggatttctacgggatacatccattcttatatactagttaggatcgttcagtcgatttcagggcacagtaccattggtatttagtctaaatatgaacgactgttagttatttctatcttttcaggtaagcatcacatgacccatgcccctcaaccctccgcgtcagaccaatcacaaacctgccagaaccccgttaccgggattgagcgctaccactctgttttcccctatcctatgatgaaaaaaaaatcaaatgaagaggataaacagggtgtttgatcacagctttcgcttgatttgtgacctacaagcccgataagagaccgtgttcgcccaggactcaaaaatggaggtgtatgagcatctattcgaaggttgttctgaaaaatcatgctaaggtaaccatacacagattacccaaaaaaggaaagaaggcgtgtactatgtgccgccagcaaaaggtacggctgacttccccttttattcttttataatgtattaactccagtaggccaagtgtgatgtctggcgggatgagactaaagcgtgttcccgatgccgagaccgcaacctcgaatgcaccatagatgacagcttcacaagagagcacaagcgtcggtaagagcccgaacccgagtaagacggagggaatccacttcttatagttctccaagccgatacatggcattagaacacgagaataagcggtggcgccaacaactacagagctcacagcagttgaactccgattccgtgccgattgcgttgcccacagcgacaacggaattaggcgtcccggccgtgctgaagtcagatggtcaagtggacgattcgcagggtttgccgctaccctatccccaatatcctcttgcaccagcgagctccacatcgggtgtgatgatgggaggggatgatccgacgaagccccgttcactgaaaagccttaccgttacaggcgcagagattgatgacctttatcaattgtagatgtcccccaaaccttgcggtccacaaggtgctaatatcttgcagattcttccatcattatgcctctttcctcccgatcctcgatgcgcagaccaagccgaatgcgtactacgcgcagtctccattcctgttctgggccgtcatcggcgtagcgagtcgatcatattcccgaaacccgactttgcagactgcgctggcccaggaagtcacggaaatggcatttctgtcggtcatgtcgacgtgcgcgccgtggcacatcatacagggactattgctcctgctgacatggccgtttcccaaggagaatcgcccagatgtgacatttcctctcagcggcatgcttttgcatgtagcgatgcaaaatgggttccatatcccgatgtcgagccatgaattttcccgggcgaagattccggccccatcggagttggatatggtccggcgctcagagctctgggctcattgtgtgctggtgtaccaacggtgggtttctttcttgcaaattgcgagcaaccgaaatcatcgtgctgattcgtggcagatcttgtgtgatcaaagggcagtctccgcaaaatctgttcagtttggcacaggataccatccaacgccaggtactatttgataagattgccccggatctggttcagaaactcaagtgccaggatgtcgttgggagatgcagcgaggcagttatggagaatggagttcgtgccatgtctctggaccaggagctggctttagacattctgctgcggaagtatgagggagaggtagacgatattgcactgcaagccgtcggtttgtttctcacatatacccctggcaatagtccatccactaacgcttgtttatttattgcagatgacgagaggtatcacattctcctttgtcgtatgtcaatccacattttccatttctacaaaaatcaaaccctcgtctctagtggatgtcttccacgtcttatcgccaccgcttgcaacttgatagactatgtccaagcctttgcggatcgtatgggagctctcttcatggcgcctattcaaataagcttcggtctgctcctggcctcgatatcactgttgcgaattctcaaaagtgaatatgcctctagcggactcgatacgagccgtgcccaggcgtctttcttcgccgccatcaatttggctaagcaaatatccaccgacagaagcgatatagctgctaaaacgatcactctcctgactcaactctggaatagcagcaaggcattccgcaaatccgatggctcggaatataccgtacttcgaattcgaagtcgcttgatcctcagtcagatcttggatgcagtatggtggtggcgtgatgaatatgaccctaatgcgcgcatgaagatgcaagcgttggagtctgttgacggtccttcccgaaccaacatgcttccaggcattgaggcagggcgtgctatgacgggaacagatcccgctcgggagcccgctgggggaattactcagaacttgggtcatttgcaaggagagttcgagatcaacgaggattactttaccaactttgagtggctgagtgatgaaattttctcatttcctccggattcattgttagcaaccaacttaccgtgagagcataagttgacttcgaatctattaaggacccatgttacctttacattttcctccaatcgcggatcacgcctttcctgccgcacatatggagctgatatcaggcctcggtatctattacaaccccataattgccgatctcgggccattacccttgtatgtgcaagtgtcttcggcttaacacccccagataccgcagaccccacctcgggatgtcaaaacaaagatctcaccaagtctacgccactagaacaagcaaccatggaagcaatgcttggtagatcacgatgtacgcgtggcctcccagcccggggctatgaattctgcaggtgccttttaagcactccacttgattgatagagattaattgcctgcgatcggccttaagctcgattcgggggatttccggtgaattagatatggaatatccacaaaagagtgcatggataattttaccttgacattgcacttatgttaaatggcaagcaaccttggaataaccactgcgtactaggtggctatgtacagagcaggcaactacccctgaacatgcctcgttaagtgagattgaattgccggtttatattaaaggcggtcggcaatacattgtaaccccgcttaagcctcggctccttatctccaagccttcccccagcttttgcttctctctctctttgtcataggaattatttccattggtcaatatgttcggctttgtgcaactaccccggtcaagtcgaggcgaaacccatgttagtttacggagcacgggcacggagtacggatactccgcacagagccctcgatcgttccgttcatgttttctttcccataacataatatcaattcaatcgttagatggcagtgattattcctatcacgcgatgtacccccatcacttggcatatttcttggcatatatctcgggccaatgaggagtatcgattgtaagcgccctcctcaaacacccctgcaagtccgcggggcctccggtttgagacatgatagattcgaagccacctcattcgggtggtatccagtcaatcatcccagccatagaagcccactagaaaagtctccccacacattgttccacagtgcttgtcttgccctacctgagttggcaattcttgtcacccgctaatcatattagggagtccgagggagtccgggaacagccctaagatgggatcggacaatctcacaactccattattagctccggggccatggcctaaattcgactaatgcccaagataagaggctattgccggttatttgtattgcaggggctacaaccatctttgtatctattgggaatatggcctttcaccaaaaccgattagccccggagatgggccaacctggctgaaatcagacacatcggttggttggccactcattttagctgctaatttagcgtccacgctaagttcataacggcaggttgaccttctaaggttttttcctccgtgcgctggcttatcactaacaagctctcaggggattgcttctatgtcttggaagtaggatgtacatggtatagacagcctacgctgtctagaattacttggaaaagtgactatgctgtatgcttcaccccctactaatacacctcaggtattttatgtttcctatattcctctgtgaaatcccctcgaacgcgaactgggctggagtgaatagtcccatgtagtcgaaggtaacccaaggaacgccaccaagtatctagatgctcagatacgatggatgttctccggattatgcataaagagtaaacatgagaggtctgtgggctaccgggccaaaacaaggccaaatcacaacgtgggatgatattggtcgttgtcttgttatatgcacattgccactttccgcctcaaagcacctgcctccagccactcaagtctcgtggctctcgtctaaccatctctcacttctctacacccctgtctctcttccccccacttctttcttctcgtcgaatcaattccctaggtcgtcgctcggtctcatctcggttcgtgggttacatccactccaggataagcctgagatatcctctttgggcgataagacggacttccgacggtctcagtcttcgatcagctttaaatcatattcgaaattccctgttgttgctttcctttttctcattcctctcgtctccctgtgaagttgacatcggtactccatacgcttcaccatggagaaggacgagtctatcgccgtcaccaccggcgcgatggtcgacgagactgcgcctgatgataaactcaagaagctgcgtgatctcaaggaccaccatcactgggatcctaacatgcccgaggatgtcgttgaggaactcgatgaggcattacatacatccgacaagcatacccaagaggtcatcgctcaggaactcctcgagaactccccgtaccccgaggttcggtccgctgtctccaacgtcgatgagggtggatcagtcaacactattcgcgcctgggtcattggtcttctatttgcgaccatcggctcggccctcaacatgctgttctccatgcgccagccttacattgtcattccctcatacattgcgcaggttgtcgcctaccccgtgggaaaggcatgggaatggtggatgcccaattacaccgtccgtatctttggctatcaaaccgaactcaaccccggtactttcaccaagaaagaacatacaattgtggtgatcatggcaaacgccactttcggtggtggcgccgcctacgcgacggatgtcctcttggctcagcgtgccttttatggacaacgtttcggctggggcttcgagatccttatgtgtatctcgactcagatgttgggcttcggcatggccggcttcttcacccgcttcctggtgcagcccgccgccatgatctggccctcgaccctgattaacacctccctcttcactgcactacacgatgtcgccctgccggatcccagcaaggtcgctggctggaggatcggcaaatataagctgttcctgtacactatgattggctctttctgttggtactggttcccaggatacctcgcaccattcctgagtatctttgcctgggtcacctggatcaagccccagaacgtggtcatcaaccagctcttcggtggagcgaccggcctctcgcttatcccaatgacatttgactggactcaggtctctggattcaacttcagtcccctgattgctccttggtatgccatctccaataccatgatcggcatgtttctctggttctggatcgtcaccccggccattcactactccaatctcttctacgctcagtacctgcccatgagtgactccagaagttacgacaacactgcgaatgtgtacaatgtcaccaagattcttactccagaattcacatttgacagtgtgaaatactcgaactattcccctctcttcctgtcgacgacattcatgctgtcctacgggctatcctttgccagtattatcgctgtgctggttcagactggtctcttcaacggtgcggatatttgggctcgattccgtcgcgtcggaaaggaggaggaagatgtccacggtcgtctcatgaatcgctacgctacagttcccatctggtggtacttgggtgtgtttgtggccatgactgcaattggctttggtgttgtactgggctatcctacacacatgagctggtgggccttcatcatttctctgctcatttccgccgtttggtttgttcctattggcatcgtcaaggctgccactaacatcgacatcggcctcaatgtcatcaccgagttcatcatcggttacatgcagcctggtaaacctatggccatgatgctgttcaaaacttacggttatatcagcatgtaccagggaatgtacttttcacaggatttgaaaatcggtaagtcccgtcgctggctatctagatacattataccaacagtcctcttccattaggtcactacatgaagattcctccccgcgtgacttttatggcccagatggtcgcttgtctgtggtcatcgctggtgcaaatcgccaccatgaactgggcactgggcgcaattgagaacgtttgcgaccaggcacagcgtaaccacttcacctgccctaacggtcgtgtgttcttcaatgcctccgttatctggggtgtcatcggaccggcccgcatgttctcgatcggcgagctatactcgcccttgatgttcttcttcctcgccggcgccatcctccccgtcataatctacgtcggcgcccgttacttccctaagagccctatcaagtatctcagtgcgcctatcatcttcggcggtgctggtctaattccccccgctacccctctgaactatctcacctggggtatcgtcggatacgtcttcaataagtatatccgtgaccgctggcgcgggtggtggatgcactacaactacgtcctgtccgctggcctggatgtcggcctcgctctgtgcaccattctcatcttcttgaccctcaacttgaccgataccaacttccctgactggtggggaaccaatattgccgccgacaccatggatgtcactgatacagccattcgggtcccgctcgctgaaggagagacctttggtcccaccaagtggtagacaatcggacctattccatgttactttggttcccttgggagccaattatggttgcaattcttcggatatccgtttagttcagatcagacacgaatattcacgatatcacagtaataacattgatttatgttttcctcaaactttctgtatctaatatttcgagttcattacgtggctcgacaggagcctaataatacagcgaaggaacttatttctatctcttcactttccttacttcctttatcgcaagcagtaatttcaaaatccaaagatagcttcaaatgcaagatatataaaaatatgacacatgtgtacacgcttatcggactgacgaccaccaagactcaaatgcaaatcgaaaccgatgaaccaagaaaggcgaccttggtcatcagcacataccctcagccattcttgatggtaatccaaatatcatccagacttcattccattccaccctaaatccaaactattttaatcctcaacatgcatattttatttcaactcaaacccgacgacgacgcataccaacctgcaaaccaagcggcttgcgcaggaatccctcacgcgtctgcatagggccatcctggtgcatctcaaactcgaagagccggaacacagtagcacagataacgagaagttccatctcggcgacgttgcggccgacacaggcgcgaggtccgtggctgaatgggataaaggcggccttttggcgtgcggtgagacgctccggattccagcgctcggggacgaattcttcggcgtcggcgccccagatttccttggagcggtggatcgtgtagctgggtactgagagcacgtcaccggcttggaaggtgtgtccgcagattacgatgggcccgaagccggcggggatctcgcgaggaagtcccattgaggatgtgctgtggatgcgcatcgtttcccagatcacccattggaggctgggcgtttgtcagtttgggttaattgtgtgcgttgatggggtgtgggcttactaggggatttccttgaccatagcgtgcgtgggaacttcaatgtccttagggagggcgtcgtccagggtcttgcgcagcttggggataacgtgtggggtgatcatacaccagtagaggatggcacaggtggtgttggaggtggtgtcggagccagcaatcagttgagtcagggcctcggcggtcagttcggcgcgttcaagctggttaccgttttcgtccttgccctccataaggcgggcgagcaaatccacacgggtgttgttggccataacctcgggcttcagacgctcgttgacacgggcgatggcgataccagcaaggtgctggacagcttgcagaccttcgtagaagaagcggtccgggatgtacttggcgaaggggatgagggacggcatgcagccaagggtggcagatacctcgccacgacggttcagaacttcgacagcggcgacatacttgggagggtccttagggtccagacgcatctcagcaatatcctgtcccttctcgagcatgccgaagggagcaccgaaagccaagtcgccgatgatatcgaaggccaggtagttgaaccagttgagggcatccaagctaacatatccggtcttggggtctccctggaggtcggacagacggttccattgcttcacaaactcctcgacattgccatggatatattgctcgaattggccaatggacttggcactgaaagtgtgggaaacggtcttgcgtttgcgggagtgctcagcacggtcacgggtgttgaacaagccacggcggatagagacgaaggcatcgtagaagtccctaggatatcgtcagtttgggtgcagttttcctgggctgcaatattgacgtacgctttcaagaagccattgccgtgtccatagacgctcaggatagcttcgtcgtcggcaatggagacttgggtaggtgagatgcgaacaagctttccatacttcttatgagcctcatcaatcgtcaagtacttctttccctgacgggcctgcagcagcagccaaacgttggtgaacgcggcaaacccggcagagggaatgtcgcgcaggtgcgacttctgcaagtacggcaccaagtaataggctacggcgaggccgagaagaataaaaggaacactctgaagtgtcacaaacatagtgaagtgctgtataggagtgttggacaaaacaacacggagaaaaaaggtaccggcccaatgcagacaggataatgccgatctgaatgcagaatgtaaggtcaaacaagaagaatcaagccaaatccatcaccaagcacgcgtatataacctatttatgaaaagaggacgtgagatcatcgaatcatccccgagggtaaggaaagcaacgggaagcaatttcggtagtgtggagttcagacactggcggcgaagatccgtggagagtgccgtctcaagcctccgaagctcccgatttcggttattgacatgggggttccagacaaatcaacggccgcatattgacgatgtggtgactccattctctgtatggcgtaaatccttggtgcttgatttgttgaaatagagtgcgggggggatgacacgaggcgccacggacgccagatttataaggcaatagtatgtgtcatccgttctagtcagccttggaggtcgggcatcagcttacgtcagatcgggcacaaatccgaatcggggtatcggtatcacttgcagaactcggtgagaatgtgccttggcatgttgtatgtacatattaacgttgaaaatgtagatgcatggatatacatgaattaaaatggctcctcacttcccatcttcattaatgatgacgggcatgatcgtggcgatgactcatgctcatcaatccgtgcgcccccaagaagtcattgatctgtttataagccccggtggcattatggtgcagattaatagcatggccagtgtttggatggacataggcagagaaagcactggccgaggggaagatcatcttggcagcagcaggaatagaagccggtttcccacccgtgtgcaaacagtcgcctccacagaatggcacatcgttcgcaccgtcaatgacataaacagggcctgtaaaattgctctgggccggtagaccagtgatagtcaggagttcaccgatggtcatgggctgcttgttctcttctgcaaacttcagaagaccggtgtcgaaatggggcgggtagaagaagagatatacattgctgccgatgtccgcactcttcaagtacccagctgtgtagtccgagttcttgccgttgagacgggcttgctggaagttggcgccgctgagaaacataggcatatagtctgcgcttgtcgaatacccagtgagcacgagcgcatcggaaagctctgggtacatcgcggacagagcaaccgtctgagcagagccgaatgaatgcccgacatggacgatcttggtgggagtcttgatattagatatcgcaccgttgcgcaccatgcgggtcaactgggcaagggcctcgacctccaagaatgcctggatctcgttctttgcgtcgccatgtgaggagttgccaaggcccagtcggtcataggagagtgtatgatatcctcgagacaagacgtaatctacataggaatatgtatagttgttgtatggtagatcccaatatctatatttccatattagaccccatatagagaaatcaatttatctctcgaactcacgatttgtcaaagcccatcccatgtgtgaggatctgaagcgtgtaggccgagttcccggtattcttcggcatgcagtattgggtcgagatattgtagtggcccgacacggtagcatagcccgacaaggctgtttctgatagatttctaccctgtttggtcgctgagaggacgaaggaagtcgcgtcaaagtttgtctggggcgtgctgatgttatcgaacacgccgttgcgagcagtgacagggacctccactgttacattgtaacaggtcttcgcagcggctgcaccagccgtcaaagtccaaagtccgattgttgaagtacgcatcgtgaatgaattttaggtgtatctctgcactcgttcaatgaacgcaaaggggagtgtctccattatatagaatttccctcagaaagctacacttgcgacaaaagaacatatcaaaaatgcggcaagtccatttcgaaaaagtcggccccaagtgatttgtcaaaaggctgtgattctaaagttagagtggaaccgtactaatgcatagatcgatagcgcaggcccatcaaaggttgttctccggtgctgagcactgaaagcgtcttggacgttgaggtatcaagtccttaacaattgacataatccagcattagaggcatcaatcatcgtctacatttgatctgatacctcagtctgaagggggtgaagatgtataagtttgccgtgctcgctgcatactgtcgatccgaatctaaattggaacgaatgatcattcacgatctctcagtcattctgatccacttggcccgagccctaaaaatgagaactcaatgatcacgggtttctaccgaggttgatcataacaggctcttggttggtattggaggataataactcagatggaagcaagaaaccgagtgattttcaaaattgggactgtgaatatagagtatatatgctgtcgagatagtctaatagtagtccactttcaggggaattagggttctttgaaaaacggtcccctgaacagtgcattagcgagaatatagatccaactgctgcgatatatacccaaatccgaggaaacgatctacaagacctaggctttcgtttggtggagtagtcgatagagtctgaaaccactaaagatgcaagaaagaggaccagagcgagagcgagaagaatgtagccgtgcacacccgaaattagatacaaatctacgctgtcgccatgtaaattccaatgcgataaatcgtcgtataaccaagttatccataagtcatatgtgcgagccgttaatcaccagcgatcgccagttacagggaacaacccgttcttcttcttttcggcatcccaccgctctatccacaccttcatctgatcccggctcttctggctgccaacatttaccgtcgggatgacccgcccgatacgcaaagcgcagcagaacatggtcaactcgcggaacgaactgtgttcactgtagggcacgccaaagcaggcactttctcgcgtgctgccgcgctgcggggtgaggtcttggctggtgaatggtgacttccagtgttcgccgtgtagtacagtggagactggtggattttgcactagtcgcccggctggtgggcggtaggtccaaccggtcggacggaaaccgacaacacgggagaagtgtggtttgaagccgtcaaggtagtctgccagtgtgtcggcgcgaatctcaaagagggtttgcatatgtacttgtgcttcgtgaggattgctggtcagcatcgcggacagctcggggtcttccaagcaggcgcatattcgttgctttggtggagtcgcgaatatcttggatccaagtgctcgggcgattcccatgcatatccgttctttgccaatgctgtaagtgccaatcactacgagtagtcgacctccaacctgcgagcctttgtccggtgctttgttgttccccgtggcagcggagaggaatttgctcatcaaaccatctgtgctactcttccctgtatcatgtccgacaccagcctcctgattcaggcgtacacatagctctgaacacgctgtgatcacatcttcctgcgcaggaaagccatattttgggtttaggtatgtagtgtcgaggtaacatttgtcgatgtgttgttgtctcgacttaccagtgaccgggttggtcacattagggcgcaggagcggatgttgcacctgagcaggagatgcacggaagtcaccacaatgcagcacccgctgattatgcgcattgggcccattcccagaggtttgttcgaaaagaaaaagtgagctacccgggcaatgatttgcatgtatcatggtgacccgtactccgcctgtctccggtacttcagtagtagattcgaactcgaggtcaactatccacttgggatcaacgcggagctgctgtcggacaagattggcagtgggtcgactgcagtaaatgggcccatggcaccaagacttgttgagtcctatgtagtgatcgctgtgaaaatgactgaggaagtaggcgttacatccttcgacggctccgtagcggaaggcatcaacgcatatggaaaaccccgaaagaattttgtaaaatggacaagtccgttgataggcttgtttgccgcgagaagacacttcgtttgcggctgcagcagcccaagcagtatcttctgcatttccagccatcattttcgagaatgcggaaccaccaatggctttcttctgcgagtagggatcactttgcgcaggccgggcaatggcagcgcgttctgcgcgtgtcatccctttgtcgatgtcgcctgggttggaagtaggcttcgccctaggcttaggggccggtggagccgggatagggtttgcttggccatcaaggcagccgttgacatgcactccaatttcctttgctgggaattagcatttcagtaggcccaaaacgcagtaatgagcacctacccattcttcaagatcctttagcaccatttgacagatagggcatgtgctcacttccccctcaatatcttctacaccagaacagtcctttagatctttgtcaggatctacctcaaggtcgatctgctcttgttcctcgccctcccaaggccaatttcgaaattcttcgcctataagcccgtcttcttcttctatatcgtcaaaattcgcgaattcatcattatcggcattactcgtggcggctcttaccagtggcgggggtataggttcggaagtgcgttgtgtagccactattttatccggttgcaatacttcgttcgtcacagtcgtcgtgacagttgtagtttcttggagctcccgataggcttccatatcctcctcgctgtcggactcatcgataaatggtccgctcctcttctggggctttgtagttgctgatgcaggtgcggttgcttttgtagtcttcgattcgtctgattgctgtgtctcgttcactggagtatccggtgagtcgactttccgacgcttgactgccgtgtcgctctcattatatcgcttgtcatccgctttcaagaactctttatcttcaccccaaaagtcaggcgtggtcgatcgctctctttcactcgtcaccgctgcttgttcaatctttgccagtccctttttatcctctaaaaaaagcccaccagaaggatcatttcttgcactattcccccggattgttgaagcaccccggccgctgctcggtgagcgtgaagttgctgttacaaattgggtgatccgagcctggcgagaagtggcacccggcggcgtgtcggtcttctggaagaaactcaagatgctcgaattgcgctttacggaggattgtcttgtgccagaagatcccttggaaggcgtggcccctttcttcgcgtaagatccggccattgtggttcagcggagaggtgggagtccgttgcaccgtgtgcgagaatcgagttgtggcgagggtctaagaaagttcgcacttggcccaaagtagtttgatatcggatgaaacacaaaaagtatggtcaaatgtacaatatgtccataatatatgcaccgtcgccagagaaatgtatgtcaggtcaatcggatcgagaggcgcgaagaaactggatcgcgacacgaagtcacgtgctcattattacttgactcctagcggggactacattcgattttggtatgtttagagcattgtgatatagtcaaatggccaaaacaaattgctgttcattattgcaaaaaaaaaaaaaaaaaaagtctagcaaggtatcatgaacaacatagcctagatgccagcatgagctataggcgggtaatctccgacgacattgcttttgcggcgtatcaacaagattcatgagcggtagtccatggtccgtttggtatcttggacgcactcgagggtatgggagtttcgaatcattcgttgcatcaactcgtctccccggtcatcaatcggggccacatgaaaccccatacatttggccatatagtcattttcattgctggagaccaccaagtgggaacaacggtattgaagagcgcgatgcgtgatttgtcgtaaaattgaggctagagtcgtttagcgagccttgccagcctggttggcagcctctatatgatgacggtattagtattgatttctagtttccgcaactttcgtatatcctttaagaaaggaaataacatagactgagctcaagaactcagtcggggaagatgcgcaactcacctcgccgtgtggcatcctccaacaaccccacgtcaacctccgaccgaggcaacatcacgtaccgcaccacactgccgcggatgaacatgttcttcaccgaagacaggtgaggatacttggccagctccaacacttcgatatcatcgagcttgatgtttaggtattggtcgaccgatttcaggattccacgaatgcggatgtcatttttgagctcaattgtgaccgtctggttggtcagagtcttgaagaagctgtaatagcgagcccattagttcctgtccacacaaactgagtttgcgctccgcgtcatagcatacctgaagaaaagcatggttgcggtggataggaaagcttggaggggtgcttggatgaggataggcgcgctggatcaaagcggtgatttgtattctgccgatgtcggaaggtgctgtgagttggatgtaagagcttggataatgagtatcacgagatttagggacaggaatgtcgacggcgctcgagagttggcaaggtgagatgcaaaagagaagcaggctgacgggatcacgtgcacatccccatataagcggttccaactcaaccaacgctcggccatattccctcgagtttggatttctatcgactagaaactattggaggcttgttctaggtcattcagcacatatattcatgaaatatatctctgacttctaacaatgcttatgcacgtctacatccgcttacacgggtgaatcatgctttagccattccccattgaataagcgccgagtcctttgaactaaactccctggttatgtcttggataaagtaggctagctgagcctataaacacatgaacaggagtataaccccaccgatcgaatgcctatcgcttgatatcatcaatccgaaggaaaaacccccacatgatgaacggggacctcttatatgggtcaaagcgaccggtatcttttcttccgcctggcaggtcgttttatcgctgtaccagctcaagtctcgatgtttatgcatactggaggatccagaagccattccttctgttccattaggagttattcaggctttgcgatgaggctagttacgtcgagcatattgggattaacatcatgctctatgatggcatttggcatcaatttgcagctggataccaagaacttccgggtggatcagaaagaacgaatgccatctatgagacctgggaaaagggcatggcgacgcccaacatcaaaatctcgagcatcggcgttagattcttacgcactaccaatactcttatccctgatgcagatgtgcgcgtgattgatatcaatggggaaatcggcctcagtccgtaagggtattgtcttggttagtgatgtgttggaatactagggattctcgattcttggttggctgtagccacaaagtgtttaccactaatttcattagatgtacagcatgatttttccggtcccttcggttgtcttttggtcatttgtttcactcaaagttgcttctaggctgacgcaaccttctctacaacatccgcgggtaagcaaccccgaaagccgaggatcaacttggcttaggagggcgggttattcttcagcactgcagcactgtgcagattgtgccgttggtctgaaacatagttgttggaactactttgtacaatgtaaagtcactaataatcttggaggacgaaaccatcatcatgcattggctgcatgcgcataattctggcaaagtgtcagatatattgcaacgacataagacatgcggaactctaggcttgttctttcagtcgagattatcatttaataattgccattttacatggtgagttcccatggcgtgctgacttctgaacttctacaatatctagcgccaacttgtgaaagcatcccggtaagaggggaaagtgtacgacatcgattcatatcaacatgagaatgtatgtattgaactggacatctggactctacgcgcctttagggtcacatcgtccacattttaatgaggggcaaatgtgacaatgaggtcaattaacatataatttctatcttaagagaactatacttctctagcgtgcattagtatagtgaactagatgttaaattgttggacttggcgatcttttcccctcttttcgctctttttcctcctttttctcttctttttgcgatgatcactacctcatctcaccaaatctcccatcatatgacattaattaggacgatttcctgcctttttcggtgctggaaaggtgcataattgacgttccatccacctccgacgggattaattcgactaaagatagtagcccggcgcctacagtcagccaatcaccagcctcttcacactgcatatcactctcatccacctctcggcaggttcgtcacaccatctacgaacctcattcgtccattttcgcattttgaatctcatttactggactctggctcagaaaatggccttggctctttgctgacgggcgaaacccctgtccagcgcgacgcgcccatttcctctccaccaataagatcaatgtctgctaccctccagaccagggtgattggattaattgtgcccaaccttgcattagtctctgtaacggagtgactctttctgaagagtgatcggctgctcactgcacataccccgtggctggtggaaagcgcccaattgactataaacccgtcccaactgccacaatttctgtgaacgctagcgttcttcgtttcgtggacttcattctcttatgctcggtgcctatagctctggtagcttttgcatctgttttatttcttattgttatcttgctttttatctttcacttcacagacccgttgatcggtgtcgccatttcctacgagtcaagatacccatagatatttccgtgagcgagtcacgcaaaaccaacatccaacagtttgatcaggtgttcaacatgaccgatatactccgtatctcgactgtacgattcccgccccctcggcaggcccgaggaacggtgcttaatactataatggaggatacgcgcgaatccaatttcgctcaaaccagtcccaaaggctcgcccccgtccagacttacaccggcagctatcagcccgcagttgaagttgcagaccagcgggttttcggtaccaacacacgcccgccttgcccgcctaatgtcgcctctctccgccggcactacctcatcatgctcagatacagaatggcaggctcagatgcaagagttccgaggatacgacgacttttacgatgccacagatgatgatagtattgacgataatgaaaccgaaatgagcgattcatgcttttcccccgatacgcggccatcgagcttgattaccccaatcacccgcaattcggtgacctcaactgggagcagtcggaagcgctctctgacccttgagattccctcttctgcattgtggccgtcaattaccgggtccctcaagggctcgccagtcccgcccacccctccatccaagataccagtctcgccagcggcgctgtcgatgctcagtcgttctgtacctgcatcatatgccccgccttcgctcgatggtagcatgacctcggaccaagaatcaataatcagtgcattggctacaccggactctcaatctctgccagacaccaactgggatgcacatgatatccatgttcgccgagatctggacggaagcgaaagcgatctagacaatgcggactccagttcagacatccatactgtacccattgctatcgagacccagcatgaggactggcgtcatgttctgggaagtttcccccgaattcccactgctgcccaggcatattcacccccgctctcgccatcgtcctcgccttcttttcatctgaataatgagccaatttacgaatatgatgacttgtacgacgccccacagtctattgaccaaggcgcatttctgcctaactcggcactggcaatgctacaccacgttcacttagaagagacacccgattcgtgttctgagacctcggaggataaaggcgagatgtggcaacttcagccgcctcccagccgcccgagaagtgccgacggggtcactcccgcatctgagctgtctggttacagtttcagcgatttgagcattccatctcctggtggattctttgcttctttggcgccccgagcgcgccacacgtggtcaatccccaacaccaattaccaaccatcgtcggcggctgcagagggtttctacaaccttccttggcgtcgggatgatggagatattgttgagcaggtagttgaatggcatgagccccctgttgacgaaaacccagtcacagctgttcgtgatgaagaggccccgcttactgccattcgacttccctgtgacacacccactcgtcggtctatctaccaagatagccccatgagtgctgcatttgatgcagtccaggttcaggagatcccccgctctgggaacggatatgaatacgacgagtgttatgaccaagagctgcaggaacgtgcagttgcgagccacgaccggaccaatatctggttgtcagcccaagcatcttacctctccgctcttagtgagacaaatcccgcgaatgacgttgagcctgtagaatcacccaaggagtctgatagtattgaggttgaagccaaagacaccacagaagagtctaccactaagatggtgcgattcgtcgagggtgtccctgagtccctcagtcctctgcccccgatccttgctagcaaggattcaatttactggcgaggcttccagtctattcgggaacagtcaaccaagacagatgggttcatgcatcgcaacatgcgcttcgatgccgtccaatccatgcgcctcgccatgaacgaccttcacatcaactgcttgctgggcaagtatgaacttgttcgccccgagcgccctgcatacaagggtccattcgccaaggcacctcgcaactcgactattacctctgagctggctgagaaggccaaatttgacaaggtggagaaggagcagctggttcttgctcagctttcgcagcccatgtgggccatggatgctcttcggtctctcaacggcggcaatctgctcacaagtcctgcccagcgtatgcttgcacaaacctcatcaaagcccaaggcctcgcagggaccacgcaaacgcagcttccgcatcctagacctcggcggtcagtcctcctgtgactgggcctggcaagccgcgtacgaattcccaaatgtcaaagtttacaccgtcgcctccaagaaccagaccgtaaacagcgccatcaaaggccctcccaatcaccgccaggtgaacgtggataacctctgggagcttccctttggcaacaaccagtttgatgtcatctccgcccgatctttgcacgcactgctaaagaccgaatgtcccgcaggcaaggaccgcgacgagtacgacctagttctgaaggaatgcatgcgatgcctcaagccaggcggctacctcgaattccaagttcttgacgccgagatctcgcgagcggggccgtacgccagtgcaacatcagtggagtttgccttcaacctgcgcaaccgtgggtacgatccagtagcatcgaagagcttcgtcgcccgtctccgcaacagcgggttcgtcgacacgcagcgcgcgtggatggtcctcccgatgggtaccgaacacgtcgagcaggagccgatgcgcgagactccggcaccgcgtgtgcagagccaaattgaagattacgaggcagtgcagggcccgattggtagcacggcggatattgccagtattactggactgattggagggtggatgtgggagcagtggttactgaaattgcgagtggagatgggtcgcgagcgacctatgttgcttgagggtcttggtgcgctgtttgatgaggggaggaagagtggcgcgggctggacctgcctgtctggatggactatgaagccgaagcggaagagttctgtctctttggctgagactgggtctatctagggatatcgatctttatgtatttagctctggccctggtggctcgcaattaatgtaatcaatgctttatgtctatgatgttttacttcaataagatcgaacacaaggttccttccttcaccacctggctcccaaccatttccaccttccagggctagttatatcactctcggttcaacctcttcttttctttcactcacttctatttcatcttcagttgatctcttcctttgctctcaatcgacatgacccctgcgagaggggacctgcctgtgatctagactatatcaaatgcgctcatggtggccttctcgaggctttggatgccaaatcgattgccaccccagagtttgtggagtgcccgcctctcaaatatcgcccgggatgccggagacgtcggggatatgttgcccgatgagtttaaccaagaccgtgctacttgggaacgtattgtgaggtctttcggagacctcgggagttggatggccgatgctcgtcttcctgatgaattaatattccacgctatcatacctaattccatgcagtaggaggagttgatacacgatctcaaccggccacgaccggctgaaccagatgtacggcaaagacggagaggcaaagcgactgaaccaaccacggccggaccgggcaaggtcggatcctttaccttacgtttgcattagagcctacgcctcagtacctggagtttctgataaatggcctttctccatatccacttgcatgggcttcttaacatcttcgagagtgcagatatgcttctcttcgggtttttgatatctgcgatcactcaccaaatctccaaggaagtagtcccaggttatgacgcagacaaaaaaaaggagggtgtttatctcgaggaggagagtccgagagatcctgactttgtgttgtgagagataactttcgtgcacttccattcgtttcttctatgtcattaattttctacgtcggcgagagtcttccctcgcaaagttcccattttcccgttcaaagtactcttctattgtgccgtagtcaatgcaaagtcaaaaggcaataagtaatagcagactagcccgttttatgtcgggctcaggagtcagaactccctgaatcgcttgctggagagaacacgcttaacaccgctgttaattcgactcggaatgttgacgctgggactgtgcctggagcggacgttcgatgcaattcttcggtggctgttcttctatgcggtcaacatccggacaattcgctttgtgtcctgatgactctcccattttcccttcagacatcatcccagacactgaatgtttcccttacggagagaagaaagacaaggagagcagtcattgcctctatcatatctgtcgcagctgggtaccatgcatagggagacggacggggcggacgcataaacaagatagcggaagtctggctgcggtactgggtatgtctctacccaaccgaggtgatctctcataggggccaggaatactatgacaattcaagtttattgagatggtagcataaaacttctatactccggagcagtgtgccccgctacaagcactgataatggcccactttgctaagacgtatctccttgggtaacgaagcggctattctaacggctattgagatttaggtatctgtatggagtacccgatcttccagttagaatgatgagtcgtaagatcggcgaaggggagataagctataatgtgttgtatatagtcaactgagcactaagccaataaatactccgtagcaagacataaaatatagtgcaagcagagctaagtcgaaatccaaaccatatcaatccataaaagactgctaaggaataatcttataagcaaccggggagattcttcctgattggctcctgaactccgcagcttcgacgcagattctagttctatcaaggtcagcagacttgaagatctttctcccatcacctaaataggttatccaggatgcaaggatctcgaaatgctgatcctctatttcttggctgtaagaagtcaagattgtacacgtgagagtcagagccctcatcgcctgtactttgacagtatacagaaggggagacttcaaagaagaagatagaaagatagaaagagagaagaatacagcaaaagaagcccgagttgtagatttcgggattcacgctgaacccggctatatccactcttcgccactgatgtaaacacggggagcttcatatctttttttcttgataacccctccatccctctacccctccagactcctcgccccaattccttcctccaacccactcacgatacatacaacatcatggcgcctccagctatcatcgccccttcaatcctcagcgccaacttcgccaatctgggccatgactgctccaagaagatggaagagggcgccgactggctgcacgtcgatattatggacggtcacttcgtgccgaatatgaccatcggctgccctgtcgtatctcaaattcgcggctgcgtcgatcgtccttccgaaccctgcggtcgtggcactttcgattgccacatgatgatcatggaggtgagttatggacttccccatacccgcgtcattccggcacggcatgagctctccccgctgacggtcctttgcttcgttatagccgcataaatgggtcgtcgagtttaagaaggccggttgcgatctttactgcttccactatgaggcggctgtttcttccgtcgccgcgaccgatcctacggataaagaaactaccgctcggactagccccaagcaattgattcgctatatccacgagcagggtatgcaggctggtatcgctattaagcccgatacccccgtcgatgtgctgtgggatattgttgagagcgaggaccccgccgaacgaccagacgtgagtcattgccagattgcccattcttccacaccgcttcatttcaattgaatgggactaactccgtttcacagatggttctagtcatgaccgtgcaccccggtttcggaggccagaaattcatggcttcggagcttcccaaggtcgccgccctgcgcaaacgctaccccgatctgaacatcgaagtcgacggaggcctcggcctgggtacaattgaccaggctgccgatgcaggtgctaacgtcatcgttgccggctctgcggtcttcggcgcacaagatcccggcgaagtcatcgcgaagctgcgcgaggctgtccagaagcgtcgcggcgcggagctgtagagacggtacatagcacaaaaggggttaaggtgtctttgtctcatttgaggggtggtctctttaattttttatattatacattcttaatcacgagttatgaatggcatttacatgtgggagtcaactgtccacgctttcgaggttatttacattttcatactgcatgtacgaaaaaatcgattgtaccttaccaggcattcttgatgtacagatgtcataatcgtcgaattcgtgaacagcgactccctcgatcctggaccggtagttgcctactccgacttctgtgtgggagacagccctcccttggtatcatccttagactccgacttgatttcttgcggcataggcgtcgcaagcatttcagcaatagcattgcccttaggctcattgggttccatgagctcttccttattctcgacggccacatcatcaacaactggcacctccttaatcgatggggacttcgatttccccgccttttccgcagcctctttgcgcagagcatcaatattgcccgtcggctctgcagagatggactgcctaatatcatgcaccgtcttgtcttgctccgcgttgtcgagtgttggaatcctggacgagcgatggtgtccaaccaatccgagcatctctgcgttatctgcgtggaagtttgccgaggatacggccgcttgttcggggactagggtcggacgtctcgtggcctgtgatgattccggcgcggtgtcgggcaattcgggggccaccgagccgcggtgcgcgcgactggcgacaggtacccctgtagcttgtgctttcgcgtctttcttatcgtctgacttggtcttcgccttggcggcagcctccgagctagcttggcgcagggccagcacggtcatatcgtctttcttgtcttcatgcttggtaacgggagggttttggatcttgatcgtggagggtttgagggtagttggtgtcgactcggctttgggctcggtcgccgggagaggatagctggtgggtggcattccacctaggtcctggacgctgtttactaccatacgcaattctccgaattcgttccattcttcgatctcttcaagatcctacaagtcgctggggttagcggtgttcctggtatattggtacgacagaactgcgtgaaatcggcatctatgcaaggggctgtcacatactcccacaatatcgccgtatttcaccaatcctggaatcttcttgcccttggagcgtcggccccagagcttgcgggcagcgtcgtcggtggcgacatcaatggcgcggaaggggattttgttcgctttgaggattgtctcaattctggaggtcgctgtgataatgtgcgacgaccccgcggtcagggaagtgtagaggtagagggttgagtcggacatgttggagctgtggtgttgatggtgtaattaatgggtgttgaggatgagagatagggtcttatggaaggaatactgaattcattcaggggttagtcttgtctttcctcttggattgagcttctacaggagaaaaataatttatttaccccctaggggatttgttatgacgtggcttggtgggtatcacgtgcagatgaatgctctctcgatttcagagggttctccccctatatatgtctgtagctgtacttggtctatgatgtataccaatcccctcagtcgagtacatctctccacacgagccgttccacatgtccaactgctatctttccaggaccccagtgtggcaacttgacgtcagatccagagatccaagtatcctggaatattctggttggtttcacctgttcgggttcagtctggaacaccaggtctattccgtgaacagcaacctgacatctctcaagaacatgcgccagccatggctatagttacctgtcacatgtttatcaaacatcatcttcggggccaaggtctgagcatgatcagcatgcctacccactaactaagctatagactttatgaagagttgggtaagaagcaggttttagtaacgtcaacttaaaacgtctttaggcacttctcgcacttcgggcactttccctattattagcaattcgataccagttggttcacgaggtcatcaagtaatccaatcatgggagtgttattgataacggtttggactggtcttggcggaagtgccgaaatacaaagattctacacccgtatgggatgaataatcccttactacctgagagtacccaacaacagcccgatatatattgtattctgtgagtgtggtcacaagcacacgagacggatagtgcacacctataatagttcctcgtatccactcaaataagcaccaggtgtccctgtgttatagtaggctgcagaaatatatatccacggtcctttagaggaagagcctaagagcctcgaaggacgcgtcctacactggaggcgcagcgatatgcagaaagcacaccaatcatgctagtaggcaaagaaaatgaacctactgacacaaacttctcgcctgcttggaaaccaggccacggaacttgcatggaagctcgatctatgctttccccgagtcatgaaactgcagcccagctcaactcattcggcgtctgggatctattactattggagccggctcgctttcttctatcgcttgtcggcaaatcggccgagctgtcccatgtcacgcgatcgacatggggaagcaggctgcatctatacgtttaaatccagggagggcggactgtgggtgcgaagtatacgaattgaaaggcgttaacttggaggatatgggttctcaagccgttctatcacgaattaatactacgctcggggagtcaatatcattagtcaatatcatcagctgagacttaggcacgagcttacttattaaatcaatattccgtatagctctcccattccaatgcaatgcattagaatgacttgtcccgtgcacacgaccaggaatttacagcctatcatccaaggtggctgaaaggtggctcatcgatgggtttctagtcggacccgagacaacctctgactgcaggcatcagcttaaaagctagcattaatgcaggggcagacttatcagcgtctgggccatgtaacacccgcagagccacgagctttgacatggcgcaggtaatcacgcaagagccccgtaccctgtcaatccgttctccccgtagaatgacgaagtcggtcaaggatttgagttgacggtgagagcaaattcgtgtcgaatgtggggaggactcttagcttatcatgtatgtaggcgatagatgatcaaaccgaaattcgcccattcgacgggagtgatcccgcctgtctcgggataggaaaaatgatccatcgtcgaaatttacaatgttgtatgaagtacgaaatactacggtgaagaatttcctgttaggtgcaagaatgtctagccggcgatcctcattgactaccccatacagattgctccgtggccatgttgtgttcactctaagagctatcctgaaacagatcgacgtgatcgcggagggaggtacggagtccattttcgatgagcccgagattgccgctctataatgtaaggaatctattgccggcacaacatagtcgccaacgctcaacatcatagcggatcaataaatgtccaaccattatccgatcaggagaccgatccacctcagaccgtggagcctctgtactagtcaccactaacctcgtgtatcccgaatagtctcgatacggcgtatcggaggggtcaatcgatagcgtgtagacaggcatgaaagagaccataattgggaacatcgactacaacatatgagaacaccctgttgtatatttgataggggccatccctgacaagcataaacatgaaccgtgggactgcggcgggaaccttgcaacgacccacggtaacacggtaacacgtgaatcgaaccgttcgacactctatttcctcggctatgttgtacttcctcattaatcacgctattatcctttgctagtcatctcgatcggacattgggcgctgacctagggagccaaacagcgtcatctgcaggatgccccagctgccacgccagacgacgtggcagttcttggtccgaccgtagcaaatggatcctagggggttgtttcggagtatggcggtgctggaccggaaaacggaggggttttgtagtttctttcatgctcccgctgtaggcgcttgctacttgaggggccagtgacttggttatatgtatggtgtcatgtaccccggtttacatgtatcaggtcaccttttcgtaagcaaggacgcatctgctggctcggaccactctcggggtgatccggttcgctgcctcacttttagttccttttcgttctcggccgtctgcagcttcgcacccagcaggatctcgcttctagcaggtgtcggccctcttacccgggtgcatgcctctgggacatgggcttgctgatgacctcgccacggataaactttgcggccatgatattttattaaaaaagcagaaaattaccggaaagagaaatacatgactacccgaacatctcagggtccagacccgatcaccggcttccacgtttctgggagcacggagtatagtacggagtagtctctgcttgccaattctcgtatctctctttgtggggagtgtccttcatcgtcgatcagaacttttgtcttcttttatctactcgtcggcccaatctgcatttgcttcttctcccaacttgccatattgtctaattgtttttatccttcactatacagcagaccgtggtacattcatcgcaacgcagatcttcgacgattgcattgataagctcagctttccacccgcgcagcttcgacttaattttttttattactattgcgcttcagttctacgtacgcatttcttacctattctctcgcgcaaagcatgcgctaactattcgcagaatacaacccacccttctccatccattttattgctgatagacagttacttcccggccattgcgaggaacccattgcgccatgactgtcaatctggatgacgaactgttcaccagtgccatctccggataccacgaggcgtttttggtccaacactcccacctcccggaagatgaacgaaatcagctctggattgaacggctgagtcagttcatcccgaccaacgaccgggattccaactggcagccagctgggagcctggggaaacggaatcgacaggatgcgacaccacggacgttgccatgttgtgatttgggtcttcctcaggcaaaacggagagccaccgtatgtgtgaccttggttacttgctccagccttctcctcgcgctcgcgtctcctcacttcaaccgccattcgtccttggattgacaattggcagaccccggatctctcagtcgattgcccacgcgacctctcctacgcctgccccgcagacccacctcggaacggcgctgccttcgcgggacaagactcctaccgacacacgccgatggtgcgctcccagagccagcaaataccggtctcccaccagcaccaccccaccggtgccgccataggtaaacgtcaatccttcggcctggtacggacccatcgcctcgaccatgtcgacgaattttcgccatccgatttcgcaaagtatttggacgttcctcccagtcaaccctgtgactcggcgttgactttcggactcgcaaatcatggacaacccggacctttccctcaataccctgaccggacgcccccctggaccgaccaggccccagcagctgcgccggagatgtcccgcagcacgaccgccgactccttagttggtggaatcaacatgatccgcttcgactcgaccggaccagctcagtatcaagaaccgaccgactccgtcccgccggactgggtgcctcctacctccggcctgccgtatcaagactcctttctctcccccgtgtaccctgacctagatcccacatcgtcttccccattctcccattctcccttctctcacccatcgtccttctccaacctaccattctcggcatctgctcccccagccgcctcctctcgctacccaatgccccacaatcgcctcctcttcgactgcatcgacggccataccctggcctcacagcgctcccgggctgtgcgacgcaccaaagagcaaatcgcccaagccacgcgccgcattgctccaaaggtcgagtctgtcgccagcagcatgtcccagatcgataaccacaagatggtccgcatctcctcagcagacggcacaacaaaggaagtcgccgctatccccaaggcctccgtgcgacgaccgccacgaccaaagacatactgccgcatctgcacggaccatccggacgggttccacggcgagcacgagctgcgccgccatatcgagcgcgtgcacgcttccgtccgcacggtctgggtctgccgtgatatctcgcctggcaagtacttccttgcaaattgcaaggcttgtcgcaatgggaagcgctacggtgccaattacaacgcggctgcacatttgcgccgcacgcatttcaatccctgtgagcggggccgcgggggccgcgggaaagatagcgagaagcgcggcgggaagggcggaggtaatcagcccggcatggatgttttgaaacattggatggttgccgcagaggaagtcaccgaggcggctggcgatggcaccaactcgaagcttctgattcggaatcccacgcatctttcgactagggaccctgggtatcaacttgctgttgctgcttgtggcctggttgagggtcagcctccttatgttgtggagtccgctccgctgaaggagtctgaccaattccccgagtttcccgatgttccgtttgagttcgattttgagatggatcttgatctcgacctcgacatcgatgagtcggaagattcctcattatccggttcgcaggcatcctgcacgcctgatactgattcatatctcaagtgagcaatcgtagtctgcttcattttgccactgggtttttttacgacagtttgtccaaagcactgtatgatcgagttcgtgtactgtactttgggctgtggttaatggtctctgggatttaggggttcgatcttttggctttatatcttgtttctttggcgactttgtatatcgtgtgatactggcattggcattcggtggagcgttcggtggagaccaattctcacagggcgtactgacagtaagaaggtgatctttgataatcaatggcacttgcaggtacaccgttgcaattgtattcagccctgtacttgtagcaggtacaagcatcagagtgttgcgtggtatgaggatgcaggtaccgggtactgcccaggcagcaacaataccggcggtgagtgccaagagtcagacacggactgtgagtggctgaccatcgccgggagtggagtccggtgtgacccggtggccgatcctcagccaatggaatgccgcccaagggatgcaattcgtggctgacggcctttgttggcgatagggctggcagaactgtggctggtagaacttaggtgatactgtggcctaagggccgatgggtatgtctgaggtactgcgatgttagtaatccgattgttgctagttggaaatagaagtattcgcctgcaaatgtctcaagcaccgagatagaagcaaaaaaaggccaagaatcaatatttactagcaaatcggcccgtgtggagaagcaggggaaaggaggagagacaaaaaggtacttcaaaggtacctcagccctggagtcttggcggccaaatgcccctatcgggcgcaccggtcaggtacctctcaagtaccccgacaatttccttcttacctgcaatacaacctcgagaaagtaagttgcctttttctcctttctgacactcttaatctcacatcttcgcatcttcaccttcatctctttccacctcttcaatcgcttattttggctcatcacagcctccccctttcgaccaatctctgtcttcgccttatcccaggtacgtggatttagctgctgtggtagccattcatgcaccgtgaccctggtctcatcaaaggcgccgcaaattttgatgttgtataatgttgattgtgatcagtcgctgattcgttctacctcgattttagaagattacctcccgctgccatgtcttatgcgcagcagcagcctccgtatgggtaccagcctggcgctccgcaaggatatggaccccctccgcctggccctcagccggggtaagtcagcacctatcagcccagaactcgattttcgccgtcttgccaggaccaaccattggcgataccgaaaccgagaccgatcggcttctgtacgctttgcgaccgcaaaacttgtcgcctggtctgcggcgagctcatgtcttggtcaatactttggacatggtgctgatcaacttgcaaatgcagatactaccagcagcctggatatgaccagcaaggccagtacccgcaaggccagtaccctcagtacgcccaaggccagcctggtggagtaagtgttgacaattaaccacccaagccacacacacttaccgataaacagatgcaatacccaaaccaagctcctcctccacctcaacagcctcaagaacaaaaatctgaccggggatgtctcatgggttggtaagtaaccatattgtcggtgaaggtgggaacaacactaatctgagctcttttctttcagtctggccgcgatgtgctgttgcttggccctcgacgattgctgcgaatgctgcgacgagtgctgctaaactctatgacccatgacatcgacgatacctttcttcttgcaggcgttgggatttttcgatatgcccacaacattccaggacagaacactgcgctttctgaataccaataatctcctttgtgtctgttgcattgggctttcattgctctgggagaaatactccagtccggtcaattctagctttaagtattcgttcattgcgttcaagagtttatttgagatcttacaacatacataattatccgttgctcagatacatgcgcgtatgcattgaaatgcactcaagatatccattatcacattggatatatccaaatattgttacaccatatgccgacgatcgtctaatgcttaatctctgtttttgtgctcaaactggcgatcttgaactttcaatagtctcaaagtatccattcctgtcaagctgaatgcttgacaaatcttgtgtctgttggaactggcgatcacgcataagtccccacgaatgacaatttgctcaagtttctttcaaagacattggtcagaatggcgactaaaccccaagctacccagcgtagcttcatggcccgataaagcaatgaggtaaagggaaaacgttaccaagcatcgaaccgaaagaatcgccatctggcaaaacacagattgccttgaagctacgtatcaaacaggagagatctatctagattgtgctattttttggctttctgcggtggatatggagtctccaacagacataccagacggtggccgatcagcttgcaatcggccttcgcgataggatgtaaagagccgtctcagagatccctgagcaggccaaccgctggacgatggctgttaattcttgataatgccgataatattgatatgtggattgaaagcaagaattcaacaactggagggttcaaaaattacctccccaggagtgaccaaggcgtcatcgtcttcactacagagtactcgaagcaacaaagtagctcaacatcttacccaacaacgtcattcgaattcccgaaatggacgagcaaagagctactcatgtattgcgcaactccttgattgacaaggaattcctttacgatactgaaaatagcccagagcttctcgagcaattgacttgtgtccctttggctagtgtgcaagcagcttcatttatcaacgagaacagcatgacaatcgctagctatgttaagcttttagtcggacaagagcagagtgccatcgatcttctgagccaggactttgaggtcgatgcaaaagcattcgaaaccctgtcgtgaccacatgggtcacataatttgagcgaattcgacgacaaaatcctcccgctgccgactatctctctctgctttctggcctgtatccaaagagaaggatattccgatattgtcccttccgccggcgtccaatgtcgaacagaaaaaggtgatcggtgttctcagctccttttgctttgtacgtgccacgcatgaagattcttgccttgatatgcatcgcttagttcatcttgcaagaaactggctgcaatcagtagacatcctccgaaagtcaattggatggtttacgtgggctagatgcctggttcccctttactgatgtggcagattatgagccagtggtgagtatgtgtccctcatgcactccaggtccttgatctaacggtaggagaggacccatcttccgaggatgcgtttttttgttcaagttagccagatgtcaaatgactgatcgaagatacaaagaagctagaaaacttctcaccggggatgtcaaaatttcagagagaatttttgggcccgaaagcgcatggactatttaggatcttgattgggtggcgattggctgttcatggcaagggtagccggagaaggcaatcaaaataagcgaggactggaaaaaccgcagaagagacttcaatagcatccaagctgtccgggctctgcaccggtatcggctatgtacacgcttttgaacaccacaagtctgcagagctttgcaggaatgttatcccacatcatatcaaagcatttagtgtgggctcatttgagacgactgatgctataggttgcctgttcatggattgctggtcccatggatactcttggatgtgtcagagctagccattctagtactgcatatctacagaaaggtcatcggatcggccaatcccagaacggtgatggtcatggtaacaatggcaagtatatatacggacggatggcagcataaaggggccggatcattgctaaccgaggcccttgagatccaaattccattattggatgtgagtatccctcaattctccagacaatggcgtacggatcaactacatggttgtttacgcaaagatgcagttgccccgagaaaaggtacgtccggtttagcgcgcaacgctatggcttagatcacggagttactcggctcaatacgtatctgtggagcagtggatgacgaagtcgaagcaagtttctcgttgctgtactccgctgatacatgcactaaaattgtggtacaagagcattcaattccttcatgggcagatgtttttctcgtgtttaggcgaatatgataatagaccgaagaagcccttacccgaaagtcaaggtgtatggcctctattatgcgtggcagccaagaaatgatctcctcctgcgtgaaatccaaaaagccataaaggatatgcccgcaaacgggcagatcccgagtggagaactcagatcatcagttgaaggtcagcaagttaaggaatcctacgacagcatgatctcgacaagtctcccaatcatctttaagggcacaagaacttagggtcttctttgtatgactgtcatacattttcactgctctcaagtgaacctcatcctgtaatagttgaagatacgaatgtaaataggaagtaaaatatatatttcgtggtatataaagaagtcttcaggcgagttgcttttatatcttcggagtcgccgctgctctcgagccttgccggtcacataaatccttgtcagccactgggcagcaagagccaattatgtaattcaattaagtaaccttccagctggaaccagaagaccaaaatagtcggccgaacttgcgccgtttctctttgggaataacacaatccatttagctcgacagcagtctttttacttgtccttttgctatatatcgtctcccctttctcacgttttctatgcgtaacctttgaaatttcgctatgaccgcgttctccacccgcgagccgtcggacggtcaataagtagttagcctgtgatccgaaattgtttcctaaacgagggctgcgccgagcgctttgctatattcggttgccacaccccgaaccaatcttgatttgcacgactctcgactctgattcatggagattttccgagtttataaggggtaatgggcccgtggaccaatcagcggcagggaccgttggatgtgccgaccactttcattatcaatctcccaaccaagcgagacaaatgaggcaattccatgattcatgaccggaagacgagggagtatccacagttaatatggattcttgcagccaagaggccaagcgaagcttgagaccgacgctgcaaagcttattgtggtcgacgcttacccgctcgggcctagcgctcgctagataagatgagggcgacatctgattagatctgccctgtttcgctgtgatttgccggtggggcaagccctaggctagcagccctggaatgcgctgatgagtggatataattaatttcaccaaatcaccgctagaggccaaaggccgattttgctatgcgggtcacgacaccgcgtgtttttttcactgtctcggtgtcccatccgaactgtgccgatctcgggactttgtatactataagtgcaacgggcgccccattatttccaatcttgtactgaacgcttgtttaattttacctcttcaatatgggcgtccgtcttttgatccgaagggcccgaacggtcttcagccgtatggcggcctctgacgctgcaagctcaaccgacatacctcccccagcggatggaatccaaccaagcaagatagatcctgccaccgacacagaacttcaacaggcggatatgccgggggaagacctccaacatggtgtccgcgatattgaggccatcaccttgacctggtccaagacaaccttggctctggtttttatcaagtaagccgtttccctagacaatagttaagcttgaacagttgctaaagcagtcgattatagtatctggttcctatattttgtcaacgccttccaatcttcagtcttctccagcttgagcccttacgtgtccagttccttctcggctcactcactgtctggtgtgcctgttgcgcttgccgatgcttttgcggcagcaagttatatccccgtcggaaagatgatggatacctggggccgtgcagaggggtttttgctgatgacatgtttcgctacattgggattgattctcttggcctcttgcaacagttttgccatctactgtactggatatgtaagactgccatttattctgagatactcctcagaacgaacctcctttgcacatacttacggtcgagtactaggtcttttacaatctcggattcagcggcatggaatactccattgatgtggtgaccgccgatgcctcccaactgaagaaccgaggcctcgcgtatgccttcacttcttcaccatacattattactgcatttgccggagcaaaggtagcagatgagttctactaccaggtcagctggcgatggggcctgggttgttgggctatcatcttccccattgtggcggcgcctttgtacttcatcctcaagaccactctccgcaaagcggaaagggaaggtcatcggatcaaggaaaaaagtggtcgcacatttttgcaaggtgtctggtattggactatgcagtttgattgtgagtattacctttctctatcatttcggtgcacatatcccgccggtcggacattatcgacaagacttcccaatttcaaccatttacttcttcaaacagacactaatctcgaacagtgcctggtgttttcatgtttactggtggactagtcatcttcgaacttcctttcgatatcgcaagtgaagcacccaacggctggggctcggattatatcatcgccatgcttgctgtcgggttctcgatgctctttttcttcgccatctacgaaaattggatagctcccgtgcctttgctcaacattaccttcctcaccgaccgaaccgttgtcggtgcctgtcttctggatgccacctatcagctatccttctactgctggaacaactacttcacctccttcctccaggtggtcaacggcctaacgattgccgaggctggatacgtgaataacacattcgatgtcgtgtccggtgtcttactcttcttcgtcggctgggctatccgaaagaccggtcggttcaagtggttgttatacatctctgttcccctttacatctttgctcagggattgatgatctatttccgtaagcctggtatgcgcgtcggataccaggttatgtgccagattttcatttcgatcggcggttcgatctttattatcgtcgagcagatttctattttggctgccgtagatcatcaacacgtcgctgctgcattggctttgttgaacgttgttggtactatcggcgactccgccggttacactatttgcacagctatctggactaataccttccccggcgctcttgcgagatacctcccagcgtctgaattgtcaaacttggacaacatttacgaagacatcacagtgcagactagctatcccatggggagcgaggtcagactggctatccaggccgcttacggctattccgaagtcattatgctttcggttggtgtgggtatcatgggtctggccatcatttggaccatgttgatcaaaaacctcaatctcaaggagatcgcccaggtcaagggtactgtcttctaaggatcctttgagatagcaatggtgtccggttggatatctggctgtgcgcatcatactgttcccttcttccatgatccccgggaggatacactcgcagcagcaatcactcattatcgctaattccctgatgtttcttgttttccgtttgttgtctttttcgtctgccgatgtctactcccgatccggggggaaagcatggccatattgtccacgatttactgaatcagatgttcacccataacttgaagtgggacagctggaattgatctttcaggcggccatttcaggatagagaaagatcaggtctgatcatgattacctttcaatgtacaaataggttgataccacatccatatataccaatgtcatggaagaccagttgtttatccaagcgagattattatttgcaagagctttacatgtacaattaatactacaggaatagggtctatcaccgatatttctgaattcaatcagattataaatctttcatacttggtgtagctaactaccactctaccaccattacgtataacaagcggctattctaatcctaattctcaacactccaaccccctttttattcgcgaattattagctaaatgtaaagctgcatagaaattttctgcaagacacaatggaaacatccaggagcaggcaaaaaaccgggggaaaggcacagtccggggaagaatggaggatctgcggagaaaggctggatttacccgtcaatcacaactcacatcctcagtcatggccgtgaccaactacccctcaactgcagccaaggtagacgcgtctcttgtgcggtgctcgctctcgaatcaacacgaagagccggaaattacttgcaggaataagcctcggcacctttcctgccaagatgctgcagcggtattgcatcgcccacgcaaggaacacaccattacgacacacgttggccttactcgcaccaaacctcccctaggcggtgtatacatattgcatctgtcttgatccatgcacccccgtggagatttacctcattgggaatgaagtgtcggtattgcggtcgattcggcagattgttttgtgcaaaggaagagatccagtcatggccctcgaacccctcatggagatttacttcattgggaacaaaacctcggtcttacagtaggtgtcggcagatgttctgcccaaaggaagacataatgttatgacccttaggtgtcacctcgatccatccgggtcaattggagtacaatgaggagcgcaggtaattatccggcagggcactcctcgctgggagattgagcttcctccatataaatatccgttacagcgcgcattttactcagactccctgaatttcaaatagcattggctaattgggactaaacacgaaaaatgctgcacaaatatcttcttctgccgcttttggcgtcatatggtgccgcggtcactatttctgtagcaaaatctggaggcaatgctacatcaggtctgcaatatggtgcaatggaagaggtaggttgagcttcgtgtcaattgttatcggatctaattcaaggtttaggaaatcaaccactgtggcgaaggaggtctctatgctgaattgatccgaaacagagcattccaaggaagtccaaagttcccttcatcattggacgcctggtctggtgttggggactcatcgctgtccctaaagaacctcactgacccactgtctactgcccttccaacttcaatcaatgtcaagggtactggcacagctgggttgactaatgcgggtttctggggaattgacgtccgtcctcagaagtatactgggtcattctatgtgaaaggctcttactcgggctccttcacggcttctctcctctcgtccagcggcgaagttttggccattactaagattgcttcaaagagtgttgcagatgactgggtgcagcatgattttgtttttactcccaaagcaaaggcttccgataccaagaatacgttctccctgaccttcgatggctcggtaagatttgggataggggacttgctatgcacctcggctaattccatctagagcgcatcgaatggctcacttgattttaatctgatcagcttattcccacccacatggaatgatcgccccaatggcatgcggaaagacttgatgcaagccatggccgatatgggccccgtaagtcaaaatcttactattgccttggaaaagcccaatgatccgggatgctaataatcttgatagaaattcctccgcttccctggtggaaataacctcgagggtgacagcatcgacggacgctggaagtggaacgagaccattggaccactcacagaccgacctggtcgcgcaaccacttggcaataccaagagacccttggattaggcttggttgagtatatggagtggtgcgacgatcttggaatggagcctagtaagtacattattttgccatattttgcctacatagctgacaaaatatgtctagtcctggcggtttgggctggactcgctctgaacggagaagttgtccccgaggcagatctcgatttctatgtgcaagatgccctcaacgagatcgagttcttgactggctctgttgataccgagtacggcgctctgcgtgccaaggtcggacacccagaaccctggacaattcggtatgtcgaggttggaaatgaggatatgctgagtagtggtctggcatcgtacgagtcttacaggttctcggccttctacgaggctattacggccaagtaccccgatatccaggtccttgcatctactatcgatatcacgattcctggaaatgcaggtggtgattaccatttgtatgatgtcccggataacttcgtcagcaagttccacatgttcgatagttatacatccgagcatcctattttgcttggtaagtcaataagtatacctgcgagatatgaactaacacacatcaaggtgagattgctgttactgagtcaaataacggagttggcattgactggagcaacactcatttcggtctgtacccttggtggatcggctccattgccgaggctgtgttccttcttggtgctgagcgcaacgcagacgcgattattggaactacctatgtgagttgtgtcaacttaagttttagtagaagagaactgacaaagcaataggctcccttcttgatgaacttggacagctaccaatggtccccgaccatcctctcgttcaactccgatcccgaccagacagctcgctccactagttggcacctgtacaccgtatgttaaactcttatcaggccttcaaagtaacatccactgacatgagatgcgaaaatagctgttcaaccacaacctcatgacaaacaccctcccatccacttcctccgacgacttcggtcctctgtactatgcaacaggtctgaacagcaagaccaactcgcacatcttcaaggcagcagtatacaacagcacatccgatgtgcctgtatcactgaccttcgagggtgtcggccgtggaaccaaggcagacttgaccatcttgactgcgccagatccattttcggtgaacgaggtgggcgggacgaatatcgtcaacagcaagactacccagattaaggctggcaagaagggcgagttctcattcaagctaccgaatctgagtattgctgtgctcactaccagttaatgtatcgtcaatattctaggatgtttgcgtatgcagagcatgactcaaatatattgccttccggtttccgggcttaacggattactgtatatggagtagattttcgtcagactgaaagactcagccttgatattcgtattctaaaatagccattttctatattctaagctatatccttccaacatctaccacctgtctgtcacattgagtaccggcactctgggctatgcaatcaccatgatctatttccgccagttaccacctctatgtatttcttcggggagtccctttcccgacccatgcgagttcggggccgcgtatcaatcgatcaatcgtgtctgcgcgaggcgtgtgttgacctcaccatgaacaccacgcctattccctatactcccttgcggggctcattcgggtgcgggtgcatgttcgttacttgccgcccgcacgctccagaccctttccgcgagtgaagattgcagcgacggtcgcgatgaatgcaaagatcgcggaggccatgaaggagagtctgattccgcggtagtacaccagccgagcggctaattgcacatccgggggaagatcataaatagccgagactgagtggcggatctcatcgatcacctaggagggagcgagtatattggtcagcaaggcttattcagcggctcgttatcatcaaacggcgaaggaattgtactttccatttgtctggtattccactcaaggcctcaccgaggcctgagttaagtgtattctgcatgatggtggaggtcactgcgacgccccaaacattcccgagggagcggatgaggtagacggttgaggcggagacggcgtgatctagatacgatattgttagcaggcttgcttggcaaatagctcggtcgctcgctgatccgggtaatgggctagcgacaaggatagggaaagtgccttaccggcgtgatcaaaggctgctaggaatgtgaacaggatccctgggtacaccatcccctgacccaggttggcgggaatcacatagacgagatacttccatcccgagtcgttgaatcggaggagcatgacgagcacattgccgaagagcattagggctgcgccgacgcgtacaatggaggataatctgccccagcgcgacatgataattcccgctataagaccacccagtggggtgaatagacagggaatcaccagtcgggtgccagccttgctgggtgagtcaagaaggatcacctggaacatgagagggagagtaaatagatactgaatgattcgcgttagttacgatgctcataatagtggagcgggtgagcttactgcatatgctgccatcccgacacaaacgttggcaatctgtgtggatacagcgagctgtcctcgtagcatcttcaatggaatcagaggtgcagcggtggttttcgcttcaacagcgacaaatgcagccagcaataccacgctagagaccaatggcagaattacccacaggtgagtccaaggaagaatgttaccacccaggctgagcccgaccagctgaaccgatagagccagaatgagcagacaagcgcccagaacatcgatttggtgccaaattcctcgggttcgaccgggggaggattcagtgtggcgtgttgggaactttagaactacatagcccatgaccaatgcgaacaaagagactgggacctgcagcaggaagcaccagcgccatccgatcgagtcaacgatggcacctccaaaagaagccccacagatagctccgaagccgtacgagacgttctggattgcctggtacatgccgcgttggcggaagggaatgatatcggagttgatgattgttgctaggatgcttgttagtgagtgatatgtcaattgaaagatcatcgacttacccatagtcatcaatcctccgcctccaacgcccgtcaaggcgcgcatgatgttgagaaagattacatcgtgggccacagcacatcccagacaaccagccatgaaggtgatggttgcagtgaagaaacaagaccggcgaccgagtatatcggagaatcggccataaagaggctggaatgcggtgcttgtgatcaagtacgaggtagttagccacgaagcagtgttcgcggcgttgaactcggagctgataacagcataggttgaggcagtgatggtgccgtcaaatccgccaagaaacacattggccatgattgctgttgattgttagattctgcttgatcgtgtatatattttggtcgaacttaccgatttggatcagtagaaaccctggtggtgggctccaagttgcaggaactggatccgatcgcaataaaggttgctcttcgctttcttgtgctgacgatctttcgacttcattctcgtgcggcatcacgccggccgaagcactttcattcggattcaatgccattgtcgatttcaaaattcagaccacagatttgcgattcagaagatgacgaaggacgaaagaagggcctggccgaatatcggaaacttcagagatttcagacgcgcttgatcgggaaatgcgagcggattatcttctatcttccccgccaagtgccaagcacgacatcgtattccactgtgacatgatcaccaactattttaacgagatctgatggatgtgggcgattttttcttctcttctctctctacacaactattcaaaccaaagaagtcaaagtgactcagtgcagagtacccatctaaggttaatgtaccctatcatgcacgaaatgaccagaatcatggaaactgattgctggaccagtacttatcatgaagctccttgaagccgttgcctacactgcagtgctgttgccgctggtcgcagcagactggcagttcaaatctcgaaccgacctggccccgcctcgtctgaacatcaccatcccggcgacaaaggatgtcgagaagggttacctcttcatcgcacctttcccgggccagtgggctgagccgcagtttcatggtccgcggcaggaagctccgtatattgttcgtgatgatggtgagctcgtctggtcgggttatacctacttctccatctgggccgccaacttccagaaggccagatggaatggtcaggatgtgctgttcagctttgagggcgatcataacccggcctatggacatgggcatggtcatgctaccattttgaatcagcgctatgagactattcgagagctccgcgctggtaatcacaagcttatggataagcatgaattccatgttgttgatgagaaaactgcgttgcttcaggtctatcagcctgtgccgagagatctgtctcgctggggtgctagtgccgagcagcagtggattgttgatgccatcttccaaggtatgtttgtttcagaatatatgaagagttgttgctaattcgcagtagagttggaccttaacactggagaactgctatttgagtggtctagcctcgagcatgtttcccccgatggtaagtcaattacctctaacccttatggtggactggtctgacatcgtacagaggcggtcctccctctcaacccgggacaagcgggtgcaggctataactcatcagacgcatgggactacttccacatcaactctgtggacaaggatatcgaaggaaattacctgatttctgcgcgggatgcttgcgcagtccataagattaacggtaccaccggtgagatcatctggcggctgggtggcctacgctcagactttgagctcggtcccaacgtcaaattctgcttccagcatcatgcgcgctttgtcgagcagggtgatgatgaggaggtcatctcgctgtttgataactccgctcatggaacagagaatcatcgtggcaaagaggtccacacccatcctttctcgcagggcaaggttatttctgtcaacactgccacctggacttcgaagattgttcaagccttccaacctcccgatgggctcctcgccaagtcccaaggtagcactcagcttctgcccaacggcaatgccctagtcaattggggctctgagggagctatgaccgaattccgggcggacggtactccgatctttcacgcttacatggactcaggactgctgggcgagggtgtccagaactaccgggcattccggtacaactggaccggtctgcccacagaagagccggccatcgtggctgagaagacctcctccggcattgaaattttcgtttcatggaatggtgacactgagacggcggtttggcgattctacgccgtcacggatggatttggttcccgggagttcttgggcgaggctacacgtgatggatttgagacttccttctcgcttcctggtcactcataccaacgcttggcggctgaggctgtctcggctcgaggtcgtgtcttgactaccactcgtgctactcgtgtccaggacgcggtgctcccctacggtagtgttattgcggggtccgaggaccgtggctcctggagagagttgattttgcaggcatagatgaagacaggtctgtgtactaggctctatagggagttgaatgaggtgcggtgaggagcatagagtagtttggagcagtgtcacatgatcttatcatctttttacccttgagctttttgttctgtgtaattcattagactttggtatcgcagtatagcgaccactgcgagtggtattgtagctgaaaataagatattcatgtcggaatgcatctacaatggcgaaagggtatcgtctatggtatagtctatcaggtatatactacatactctcggatgctcacaactccgagccaaactcgtatattggccgaatccgagatccattaaccgaaaagggaagttgctatgaaccgtggaatataaggcgtgagggtgaggggtccaatgctactacgcagccaatcaggaggcgggaaaacaccttaatatggaggttatgtgtatatactatcgagaattaatgccatgtgacatccaaatagagattcagagatgggaatattcccttattcagctggcatggagatgttcatgcagtgtagtacatgaatcctccgtttccctccatttccggaaagagctgagacggtccatccatggatgttgcggcttttccctctttcctcttgaggattctcgggtctgtcactttccggctgccgtcgttctttccttctgtctcttgtcatcttccttcggtccttcgttccttcttctcttcttccttcctcctgccatcctttctatcaacactcatctgtcgcgtctcacattttgtttttctcttctgtcaacaactctcgtttaccttcttgaccgtgtcccttcatggcttcacgtcttcttccatctttgggcttttcgccgactccgctcatgccagacccgatggaaaacgtgtcggacaatggtgtcgttgatacccccggggtgaagaccccagtgtctgagctctgtgatgatgatcgcgacgggcaaataaccactcttgcacgttctctttcacagatctcgcgacagggcagtggcaaggccagtgaaacctcagagggtgtcaacactttcctcgaccctacccatgatccagagctcgatcccaatggtgaccagttcaaatcgcgtaaatgggtgaagaacttcatccagatgacctctcacgacccagatcggtacccgcgtcgcacagcaggggtctccttccgcaacctcaatgttttcggctatggaaccgcggctgattaccagatgaacttcgccaatttctggctcaaaggcacaggatggtttcgcagtatccttggcctccagaagaaagtacgcattgagatcctgcgagacttcgaaggcaccgttcacagtggtgagatgctggttgtactaggtcgcccgggaaggtatatgaatcgacgctccccgcgaaaaactaattactaacggccaaaagcggatgctctaccttcctaaagacgattgccggagagacgcatggcctctatctcgataaagagaaagggtccgaggtacagtatgaaggaatgtcctgggatcatatgcacagccgtttccgcggcgaggtcatctaccaagccgaaaacgaagttcatttcgctcagctgacagtcggtgatacattgctgtttgccgcttacgctcgagcgccgaggaaccgactgcccggtgttacacgcgaccagtatgcgatacatatgcgagatgtggtaatggcaatgcttggcttgacccataccatgaacaccaaggtgggtaatgagttcattcgaggtgtttccggtggggaaagaaagcgggtcagcattgccgaaaccactctatgtcgctgccctttacagtgttgggataacagcactcgtggacttgacagctcgacggccctggaatttgttaagaacatccgcctctccactgactataccggatccaccgcattagttgcagtatatcaagcgagtcaatctatctacgacctctttgacaaagcgattgtgctctatgaaggccgtcagatctatttcggcagtgcgcccgatgcccgacgcttctttaccgagatgggattccattgcccagaaagacaaaccactgcggactttctcacttccctaaccagcccttcggaacgcctgattcgcccagggtttgaagactccgttccacgtacacccgatgagtttgcagcacgctggaaggacagcccagagcgtaagcagctgcttgctgagattgaagcaaacgcagccgaaaacaccgctagagaaacaaaggttgagcaattcagtcgctctcgtgcagcagacaaatctaggtttactcgtgcagcctccccatacaccctgtcgtatccgatgcaaatccgcctctgtctctggcgagggttcttgcggcttaaggcagacatggctatgacgctcgcgactctcattggaaataccagcgcatctctgatcattgctagtcttttcttcaacctagcgctcaataccgacagcttctacaagcgtgcagcattacttttctttgccatcatgattagtgccttctctagctcactcgaaatcttgatcatgtggcagcagcggccgatcgtggaaaaacattacaagtacgcagcataccatccctcggcggaagctatcagcgcgtggcttgtggaaatcccatcaaagcttttactggcagttgtattcaatttgatcatctatttcatccctcatctccggcgaactgcacctcatttcttcatcttcttccttttttcagcaatgacgacgcttgtgatgtccaatatcttccggtttatcggcgcaatctcacgttccgtggcccaggccatgcctcctgcttcagtgttcatgcttatcttggtcatttatactgggtttacaattcctgtccgagatatgcacccatggttccggtggctcaactatgtgaaccccattgctgtaatgataacttagcttttgttaggccccaccagaatatgctaacacgagacagtatgcctttgaggccctgatgatcaatgaatttggtggccgatccttcccatgctcgaactttgtccccggtggcttggaaatttacaacaatgcgcctctcagctctagaatttgctcgcagaagggtgctgtggcaggcctggatttcattgatggagagacgtacattaacaccacttacgaatactacagcccgcatctgtggcgaaacttcggcattctctgcgctttctttgtgggcttctttgtgctgtacgtcttctgcagtgagctcatccgcgctaaaccatccaaaggtgaagtcctggtatttccgcgcgataaggtccctgcttttgtcaagaatgttcgaaatgaggatccagaggaagtcattgcatcagagaaaggtgcagttgctagcgaacctcaggactcgaccgcagcaattgttcgccaaacttccatcttccattgggaaaatgtgtgctttgacatcaatatcaaggggaccgagcgatgtatactagatagcgtggatggttgggtcaagcccggcactctgacggccttgatgggtgtcactggtgcagggaagacatccttactcgatgtcttagccaatcgtgtcactatcggtgtcgtctccggtgagatgcttatcgatggccggctatgtgacgattctttccagcgaaagacgggttacgtgcagcaacaggatctgcatttagagactagcactgttcgtgaagctctggttttcagcgctctcctacgccagcctgtcaccattcctcgccaggaaaggatggcatacgtcgaagagatcattcagatgctcggtatggaagaatacgcagatgccgtggtcggtgttgtcggcgagggcctcaatgtggagcagcgtaagcggttgactatcggtgtagagctagcagccaagccagatttgctgctattctttgatgaaccgacctcgggtctagatagccaaactgcttggtcaatctgtactctgatgcgtaatttggccgaccacgggcaggctgtactgtgtaccattcaccaaccttcggcaatgctgatgcagcagttcgaccgtctattgtttctcgcgaaaggaggacgtactgtgtactttggcgaccttggcccgaatatggaaacattgatcaaatatttcgaagacaaagggtcgcttaagtgtccacgaaatgcaaacccggccgaatggatgctcgaggtcatcggtgctgctccaggttctcatgcggatagagattgggccgagcaatggacgaacagtgccgagcgtgcagaggttcacagagagttggctgaaatgaaaaaggaattgtccaagcagcctgtaccccttcgcattgcagggtacggggaatttgccatgccactctggtatcagttcctcatctgtactcaacgcatgttccagcagtactggcgatctccgtcgtacctatacgccaaagctctcacatgcactgtcccggtaagttatactcctccattttatttgattggactaacaggtatagccactgttccttggattcaccttctggcacatgcctaccagcctacaagggctgcagaatcagatgtttgcactctttatgcttctcgtcatcttcccgggtctggtccagcagatgatgccgtcctttgtcacgcagcgttctttgtatgaggtacgcgagcgaccttcaaaggcctactcatggatggcatttatgatgggcagtatcctcacggagctggtatggaatatcctaatgtcggtgccaatctttttcagctggtactacccaatcggattttatcacaatgcagagcccacgaatgcagtcatcgaacgaggcggcatcatgtacctgctcattctgcagttcatgatgttcacgtcgacattcagttctatgatgattgctggaattgaagagcccgataccggcagcaacattgctcagttcatgttctcgctttgcttgatcttcaacgggtaggctatctgcgggtatttggtaattaattggtaatagttctgactggatttctagggtactcgcgaaatcttctgatatgcctcgtttctggatcttcatgaaccgggtgtctccattcacgtacttcgtgtcgtcggtactctccacaggcctgactgggacttcagttgaatgttctagtattgagtggctcactatctcgcctccagatggacagacttgcggccattatctggacccttacatcaaggctatgcatggcacattacgcaatcctggggcgtcgaaggattgccagatctgcccaatgtcgagcacagaccagttcctcgaaagcctcaacatgccgtactcggatgttgggcgcaacatcggtttgctgtttgtctacgtggggttcaatattgtcgccgcgctcttcctgtattgggtcttccgcgtccccaagcattggtcgcgcaaggccaaggagacctaagaaggttgtcttctttcttcttcgggttgtggggggtggttatggatgtcggttctattcccgagtttctactcggcgttcatattctcttactctgttgctcctgtcacagagccttatcttgtcgaatgtatctcatacatgtagcttatgttaatgaattctgtattattttgtaactttttgcgcacgagtatccatcattgggacatttctgtgggcagagatgccatttggtacttgtcaataggaaagcagggcaatgggagatgggcgagaatagcattgtcaatccttttacaattctctacatcacaaagtcttcgtcgtttgatgacttgtttcttcagcgaataaatcccctcttccatcttctcctgtcatacgcgtgacttgtcgagcttctctgacacgaaaaggcctaaggcattgcctttgcgttctttcttggctttgccctttcttgactttgattaatcaggggtcaggttcgtgttctgggtaatttgctccgacttctttcgcacactagcgtcgtattgtttatgcgcataagtacacatgttcaaggtctcactcttctcttgtcagggatatctcatggttgtcttgtgagacaagcttcttctatgatactgagtcagaatgcaagcctcggttaatctgtccctggtgaacttaccgagtgcgtccaaggttctgtctatcatgtaacatccatgcgacaacataggcaatttcctgccacagaaactcgggacgagcatcacgatctcgaatcatcggtctgacttcagtaacggcgaacgtttcttgggaggcgtcggtctcaagagatcatggtattttgatcttggatttcctgaaagtctgtttgttagccagcttaatcaccatcagctagtccagtctcgctagtgtgaaatgacctcttacccataatggacttcttctagtccatacttgtggatttctctcttgtacacggcaaaggggagtgatgagaggttgtgaagtagaagaaaggtcaggggtgagaaaggttgagaagtgaaagcaatgaagaggagtgtggggatcgaatcaactcaattcagtacttcaagttcgtatagctcttttatgaaatgctgaagcccctggccgtccacgcaatatatatctccagcaaaagtcaagatacaccctaataccaatcaagcaatgcgacttggccattcagttaataaaatcctctttcatatgtactggaattgaataaccaaatatctctaaaagatctataaaataaatcgaaagcgacgattgggttggccggtccccgcttatcgacgcggaatcaacagtcttctcctcctatccccgcgaactccatgccaacacctacttttggtcctctgtacaacctcagtcatagtcatacagctcacacaattcgccggaatacctcgagagataccaatagcgccctccgccccttgcttctccggccgcgctgtccgtaccagcgactcaactcaccatgtacgctccatctgctcagtgaatcgctcagcaactaacatgccttctaaccccaggggcgtcttctccctgatcattatcaacaaagccggcggtctcatctaccagcgcgagtttcaatctggtttgcgcaacctctcgacaaatgactacctcgtcctagctggaacctttcacgggtaattcaataccatctctctcctggaatacccattgactttgattctatagcgttcacgcgatcacccgctccatcacaccgaaaattcccatcgcccaacctgctccctctacaacctcaacgggcaccgccgctcctgctgcgtccggttactcctacccaaaccccggtgtaccagtctccggcttggattacctcgagaccgacaagtttcgattgacatgtttccagaccctgacggggacgaagttcttgttgttcacggatccgttgacgggcggcgtggacgcaatcattcagaggatctatgagctctatgccgactatgtgatgaagaatccattctatcagattgagatgccggtgcgatgcgaggcattcgatcggcatctgggcgcatggttgagggggaggacatagccccgacgcgccacgcggatatcatgactttacgaactagatacgttttgttcttgtacttgtgtccggatatcactccgtctcgtataataccaaatcacataatatattgcccttgcacactgtagaacgtacccgcagaaggtcgattctcgagaatacaagacaaaaacagaagcaaacgccgggtatgcataacagtcatattcaaatcttcgatcggaccttacgcggtgtccatcttgtcctcgtccttcttatctttgtcaccgctggattcgccatggccctcttcggggatgttgcccagttgcgtcttgccttcctgttcttcccggtcgcgcttctccttctcctgtcggttcttctcgtcctccatcgataagcgcagagcaaatgcgagctcggggtcgttctcggcggcgtcatcaaatccaaatccacccgcctcaccctcgccgccgcctccaccgacgtcggcatcctcgccagccaggatcggagtctgttgcagctgatcgctgagaagatggggtcccggtgggatgatagcgaggtaggaaccatcaccactcttgacattgtcaacgagagcctcgagcttcttggtctgatcggattccaaatctccgaaagctatcacgtcgatcgacacgttgttcttcttcatcttctttgcgagcttcactagagtcttttcatcttcttcgatgggcgagcaggagaatacgatgatgcgttgacgctgggatttttccatacggtgcttgagtgccagctggaatgccatcgaagttagttattgagagctggggacctcggagattggctggaagaacgtaccgctgcaacctggatggtcgagctgagatgagctgtgccgtggatttttgtttggtgcaaaccagcgaggattgcgccaaactcagatgtgaaggttgacaacacctcggggcccttgccgcccatgctcataagaccgacagctgactgggggtttacacgcatctttgcattgtggatgatgctaacggcatcgacttgagattgccaccgggttgatctgtgacagttagatctcatccgcagatgcaaatatggtatgatcggatgtactcacgtgtagtctccattgcgactgctttcgctgttgtcgacactgtagcttggagttagcagagtaagctaatctggaggatgtgcaatgacggacatgatcatagtagcttccagcgtcatgatggcggaatttaaggaaattaacgatgtaaagaagggcagaacagagagtgaataggagatcggcgtatgagagacgaagacggatgacgaaggcgaggtggaagctctgcattctgccactgctccccgcccgaggcacctgtttgttgtggtcttcctggctccgcacttgtacttcgacacatcccaagtctatattccttgaaatttacccaatgtctgctattaaacgaaagtctgacgctatggacgtcacgcctacgggcagtccttctaaaaagatgcgcttaacgcagcttcagaagcaggccctgatggacaatctacagcttgaaagtgggtttaattgtgggtttgcgcggtgaacacagcactaatcttgctacagtaactgagcgggcacgtaagcttcgtgcccaatatgccctgcaggcaaatgacctccgggcgcgtattgagcgacgcgtcaatcggatcccggtctcgctacgcaaggcaaacatcggtgagctgctcgaaaagcacaatgcagcctcaagcaaacaacgggttgcgtcgccttctcggaaacactcgcccatgaaggtgtcgcgtattataccaagtatctccgtagaccaagaaacttctaccacacgcgatggtagagctcggaggggaaggtacgatataccacaagcccaatttggttttcttactgacagaatgaacagccacgatggtcacttctctgacaaagagaatgcccccgccggttgcgagtctgaactcaagaatcctaagcgtcgcgtgaagccagccggaccaggcggggcctcacgcgtggcatcccaggaactacgaggcaacgagaaccggatcttgtctcccaagtccaataattcccgcacataccctcactcgcccttccgtgcatctcccgagaagggtcaaccctcgtatcttgcacgccctacctcaccgctaaaaccgaccagtccgttgcgatcacgcggcgccactgtctctgcggggaaggaccagcggcctccttcgcaggcccagaagactgccccccgtgccgctacaggacccaaacctgctcggtcacctttgtcgcgcccggcgacccgacaggccgagcgcaagaacagcacagggtccaatgtgtcttcgggtacaacagtaatcaagtccacacggactggtactggcccgagaaaggcaaccacaacatctgccgcggctgccaaaaagccgactgcccgtgggcaggcggtatcaatggctgtcaagaatccctctgcgactgcttcaatgcgcaagactaccgctccggctgtggctgaaactatgccccgaactcgagcgctacgcaagcggatttaggacgcacagacatttgtcttcttgttttggagttggttgggattatgtacctttgagcgtgggtgattacagactgcaatgaacaatatgagcctggatgctgtctttcctgttgattctttggcgcgatatcataatcggagttttccttttcgaatcttctatattcatagcttttgtccgggtatctcacccagcttattttcgacccaatactttgccgtcatagccatctatctgtgtgtatccgtctgaaaatttcaaacagacctgggcaaatacgagacccctgtcgcttgcctaccaatcaatgatattgctttttccatcacaccgctctcccggtgagttcattccagctcctgcccagctaccacaactcgggcttcacataccgcgagcaccaatctccgtgttttcataatggagatcatccgagagtctacgtccttcgaaacccttgacggcagagtcatgtattgctgcaagaattttgtcgtgcgacaagatggtatcctatactacgggtcgtggaacgatcgatcatcgaaacctaccgatatcagtcagttcaatgatttgaggacgatcaccaccaacgatcgaggcccgaaaatgcaggacacatgggctgtggcatccgaggaagactgttacctgaaaacgccaggcgtcgtcgatttcctctattcaaagctggaggacgatattcaatgcgagcttaaagtgtgtgaagtgcttcgcagacatccacacccgaatattgctacttattacggctgtcgtgaggagaatggtcgggctactggtctttgcttcaaacgatacaaggaatccttgacggagaaagtcaatcctggatacctgaacaagaacatgttccgggctagtggtcgtgagcaagtcgatgattctctcagagagaatttccatgggattttggagggaatcaagcaccttcattctcttgggcttgtgcataatgatatcaatccgttcaatatcatgcttgatgagcatggtgtcccggtcatcattgattttgggagttgtcggaagacaggggaatcattgaataacagcagagtgggacagacagacggatggcatgattcaaaaaataagcttgtcttggaaaagaatgatttggatgcctttgaagagttgaagacctggctgtttggttctgtggatgatgaatatctgttccacgaggagtatcaatttgaggaatgctagacggagcttagaattgcttacagtacccgctctgattttaccatggctttactatcgaagtagaaagcaataactatactgtccagtgatcagaggttcagacttcagacttcagacgttatacccaagaaggcatcagcgaagtgcggtataggtgtattcagatatttaatctaccatacaagatgtacaagcaacatttaaaagatgcactagcgaatagacttaggtaggctcggatagtggtggtttgaattcaaagtgattcaaggttgatttattaggacttcacgaacatgcaaggttttacataagtatctctcttaggcaattacacagcacagttatcgtagcaatcatgttgattgaacaaataagaaaggaaataaaagctcccttggctccggttaagcaaaagacccgggagagaagaatcagaaaagaagaaaggaaaaacagggtctaggtatagccgtagcctggcccacgaaaaaaaggagcatgctcagaaatcaaagcgagagagaatggaaaaactggacattgatgcccaaagggacaggtatgggtatggctgatccctcgaatcagatgcaaatgaacaaaggtaaaaaaaaagagacaaagtattccagccactatagaaatagggggaagacaaacagaaaccaatcaatagcgaccaagcagcttgttgatcacttttggggaattttcatggaaaaagaaaagggaaaactccgtcaaccagtcctatcactggacaaaaaagaaaagtaaaaagaacgctaagaaggtcccaagaaacaagaagcgagaaacgagaaatgagaaagataaagaaaatccactggattgaatcagctggatgcaagtcagagtcggatgatgatgtatcacagtattgcagctgtgcaggaagtgtaaggagatccagtctacccagtaacacccatggcacccgcattcgggcgcggcctataagccacattggatggttgaccatcaggtgcccctgcgattggctggcttccgttgctggtgctacggtcacggcgatacgctgctgggggaggaggaccgaaatcaagtccggcctggatgttagtgctggacgagtgtgcgtgtccgctgggcccgaccacatggcgaaccgagctttgcatctgccaagctgcatcctgagatggatcagtctcaatacgcgcggaagctggagtgctattgtttcggttgggggtggtgatggtgaatgtctcgccaccgttctccggtcgctgtgcaaagctgcctcgaccgatgtcgccatatcttttaaggatttccttggttgtcacttcggcattctccctaaagagagttggatcacccaagaccgattgtaggtcttccggaatctatgaacagagtcagcacaatcctagcaaaagctcaacctgggcgatttacttcgcagaatgcatcgttgtacgtgatcagggcattaacagcctcgatggccaagaagctctcctccactgtgctgtttttgacattggggtagaggatattgggcgtgatcacagtcgcaagattatggacgtccatcttgcttccagactcttcatccacatgtgagaaggatgaagtccagtttaagaaggcaaacaggacttccatcgtatcacgatgggccttgggaagcagacagcatgtcaagtgaagtagtcgcctctgtttctctgtgtcatccatttctgcgatacagttagcattgcacttgtagaccgataatcctaacatcaaaacttactttgtgagatgacaaacagtctatgcagcttgaaagtcaagagaggatcgggcatttcacggaggaacttcttcaaaagagctgcaatctgcacgggagtttcctttgtcagatcaacttgctcgtacttggtgtcaattagctctgcggtgtccttcaatcggcggatgtttccgttctttcggaagacaccctccacagacatgtccatctgccgcatagcgcagacagaatcatcaactagcgtcgggatgcggagcgcaccaggaccaacaccgtgacttgactctgtgccctccttctcgaccagatagtctagactgacaccaaagacacccttcttcttattacccttcttgttatccttgaaggcacggccaaagatgttccatatggtaggcttgcgcgactcgataagggaaaggagctcttccatggtgaaatagccctcgactaacggttccatttggagtacagcaacgtggcgaacgatgaaatattccaaagcagttagttctgagaagtaccgcttggttcgggttggctccatcatcgcttccatatttccacacgatactccccgctggtgaccctggttatatctgggcatctcggtccccccaatgagctttgtaccagcatgcctgtaggcattaggtcgctgctccttggcttgctcggccgcaacaatgcgggggatgtcgtctagcgtcaaagcatcctgagccccgaaagtaagatcagtaacaggttcgccattggcatcccgttcttcgacaatctggaaaccgtggctcctcgggtcaccgccatcattgccagatgaccctggtcgagcacttctgccttctggtccatcaatgattctggatgcgcgggctcgtttgtacgttgtggatagggttcgctcatttcgaatagagcgcagccgacgcatctcgccaacggtctgctcgagcgatgtttcttcgaggccatctcgcgaggaaccgccatatgactgggagcgtgtgttcgcccggcgaacctgggaagtgactcgatagccgtcattgttgtcgtaatcattaaggttggggtcgtctgggacgaatcaagttagacagactgccggcggcatgggggtaatgtaagagtatcctacctgaggtatgaggcaaggttcccccggatcgcagtacggcgagaagccgtgcgagtgccactttcagcaagaaaacgaattgctgcaattttgagactggagtgaaaccacccttcacggtggggccaagtttcatctggcgggcgcaagcgccgcagtagactttctcctcgctgccgctccacaatgcgtcttggaaatcagcggttaagtccttctcacatgatttgcatgaaagatgaggcggcttgatgtgccaacgactctgtcccaactgaacacattcgtcgtcaattggttctttacaggcaatgcaacaatctgaaagttgatcggccaagccttccactccagccatcaggtcgactggcgtatcgtcatcctcgtctgctaatgactccagatcacggagacgctctaggaagttttgtaaaccatctggcgcagacttctcgcgttcaagtttcagtgcaccttgtagaccgatgcggataaggagtttgaggtaatgagcgagaccagttaccagagacaggagttcctgggtgacgccaagtttgcgtaccccagtttcctgggttttcgatagaagggcgaagaaagcgacaatctttttgcaaagaagtttggcttcgcggccataggaaagttctggttttgaatgatcagcgatcgccccggatgatataaaaccagccgcgcgggacttaccttttaactcgtgggatttgatgtagtctgccaactgatcgactgcaccgaagaggatttccacatgttcgatgaagcgctttgctacgagaacaccatcgatgtaagcgccgttactcacatgaagtagcatgtctgagatgcaagcggcggatgattcttcaaaggtagaaagggtgttccaaatattgaagaccttttcttccattaaatcttcttcgtcgcgaatatgcttgcgctcatcttcgctggcatcctcatccacgggcggaggctcccatgtttgaccggcaggggataaccggacattccagaacttgtgaatcatataacattcggggtgccaatgttgattttgaccgttgcggaagatttcgacaaactgtttcaggattgctgtgtgacatccatggcaccgctgggcaaactgggttgagtagtgaaagtggcagtagaccttgctctcgtgttcatagtaagagtcctgcgcaccaaagacggtcgggcaaacggaacaggtgaagtgttcaatatgatacttccggtccaacgctgtaatgtatgatccgcgtagtgcgccgccgcactcatggcataggagacccagtcgtctaaagtaatcggtttcacaaagcggaaactggcagcttgaatcttctgaatcgacggggaaaaacttcgaagcaacgatctcgccacagtcctgagaggagtatggaagttagagaagaccccaaaaacgcgggctagaaaaaacaacttacttcgcacttgaaacactctagatgaaaagttccccctaatgctcgaacaaactggccagtgagagtttcgccgcacttttgacacagtcgcgatgaaccacctggagacttgttctgacgcccgtttactcgcgagcgatctcggggcgcggagcggtcgcggaagccggcctggtcaggacccagaccacgacccgagcggccaccatcctcctggttcgccggactgatggggcttgggcctgccgttcgtgttgacggtgactcgaatggaatcaaactatcttcgggagatgtgggtgtgtttttcgtatagctagccccgtagccagaggtgtcgacggtgggacggccgctgggattacctgcgaccaggctggctgggagtccaccggggggcatcttggtcccccgtcaggagaaatacggtggggtttgttgggttgaatcacgccgaacgctgcatgcaaatattggagagtaaggaacgggcgaggtgacgtggtaaacgggagttacggtaggtttgtatcgaagatgcaacgcggttacagattggcggcaaattgaaggtcagctgggcgcgtacggtcgagagtctgattcttaaattagaatctcatgccttggggtcactgttgttccccagagtgtactcaccctcatgccatgtaaagacacgcgggggtggctgatggaggagggacggaaataacgcgcgcgcaaagccagaggaatcgaattgaggaggtggtatagaggaatgttgtcgtgaacgaagggactgaaagcgcgcgggctagaggacgcggggaccggtcttcgagggggattgggagctttcaaggtgagaccaacagagggtgctgattatcgggccacagtcatcccaaactgaaccgacagcagattccaggactccaagaacaagatagaaaaaattaaggtgcaagggcgaggggaaaagaagtgggctggggaggaatggagatggagatgccccccccctcccctaattagttagggaccctgggtcacgtggtctatacaattcccatgtggacggtcaacttgggggagtgggtgacatattctagggtcttttagacatgattgcaggatatccaaggtcaaatctgattgaattgatctgagcacatggcaaacatcaacattgcactgtgtactatgtgcatgtagacacagcttcttgtgtactccataccgccccctatgccatcactgtgctttttatagaacactctgcagattagtgtttggtttttgtattttaatttcagaagtgacatggtagtttgtatggatatgtatgtcttttcccctaacatagcatcaaaggtggaatataggggtattttggattgacccttgactatgtcagatagtctccaggttggatatctcctaaggatgaaggatacacgaatacttaggtatctccatacatagtactccgtattacatgttagtttcttacatttcaaagtttccagggagatccatggaaaagtaatctcatcagactgatcagtacatttggattggtcgaagtatgttgatgttgatgggattacccgtacagtggagagtaggaggctggtagacaaaaaaacagacagaaatagaaaaggacagaaaatagaagatcgtgaagatcaggaaaagtaaaacacgaaagaaagagaaacgtagaaaagaccagaatacaaacaaaccaaaaacacgttaagggacaaactgtctagtcgccttgattccacctgactttaccttctctacctcctcttcatcctcctctagaccatccacaccattcgtgcttttaatacatctaggtttctattttctaagttgctgatcataactctgcgaccttcacgatacacccgtgaacacctgaccaactcacctcagacgttgcaagatgggtgaccagtgcactctgcgcctcgtccgagtacgtgcctttccaactatgattcatttgggcaaattaacccgataaaaacactaatctcacattgtcgccttaggagttgagacaggtcgagcaaagtgaacaactgggtatgagatctcttagcacttcaagccattccgtatggagacccacagactgacctcgatacagccttcactatctactacgaagaaagcaacattcgggatatccaggccctcatcattggacccccgggcaccccatacgaactgggcttttacgaggtgagatccacccagctattcaaggcgggcccgggcacgcttgttgaactatgactaaccaattgtaatcgtctgccagttctcgatcaggatcccatcaggtaagatgatcttgtctttcatggcaggtccttgctaaatcatatggtaatagattacccagcaaatcccccggtggtgaaaatccggacgaccaacaggggccgaactcgctttggacctaatctgtatgctaatgggaaggtctgcttgtaagtgtacccggatacttcttttatacaacgcctgatactaacattttctaggtcgatcttggggtaagcttgtctaacaatagagggtttttatggagcatcgctaaacatcgcaacagaacttggcatggttcccgaggtgagcaatggtcgcctgcacagggactcgaatccgttctgctgtcaatccagagcctgttatcatcaaacccgtatacgctggaaccgggatttgacgacaacgaacgggcgaacgacacggaaaatatggagatctacaagtccaaggtaaagatcgctatcttgtcagaataaactggacaatgctcacatttatatcagattcgtcatgagaatctacgactagcagttattacaccggttgaacaagccttccaaactgcgacgcctccccgccgaacggcgccaagggttggttgggagtctagcacggaagaagatagtgatcacgaactccaactcgatctagacggattccccattcaaagcaagtttggcgacttttgcaagcgacggttcctatggtacttcgagttctaccagaacgctattgagaaaggtatcgcggacgaggcacgcagacaaggaacgcccttcatccaaatgccgtttgaaggctatggcaattccatgggcggagaatggaactacatcgccctacaagcccgtttgttggctgtccgagaccaggtaatggaagagacaaaccgctgggccatcgagggtcttactctggtcaaggaggatgctgggattgccgttaaacttcggggtcggcatgaacagattgctgcagaaatgaacagttctcctcaagttatcgatctgtcactggttgatgataacccgttcgtctggagactcacctatgttggtcgcaacgagtccaagttggaaggtggcatcatcaagatcaagattcacatctctccccgacacccagaagaacagcctcgggtctttatcgagccgcccctgtaccacatttgtgtctccaaaatgggtgtgttgatgtatcttccttcgcatgctgaagagatcggccaacatatcgacggcatcatcaatacactggaagaagacaaccccccgtacaatcccctcatgacagtgaacccagaggcaaccgctctgtgctggggttcggaactagatcgcaggctttacagacgcaagcttcgagcatcactagaggattcctgagctgagctagctcactgctggtgcatgtttgctaagcaatatgtcatgcaacatgacagtattcggttatcgtcaccaactctccctcgcttgaactgtatcattttcctgccatcactatgtcttgccactgtgccttaccttacttgagatattctttatgatggcggggagactaggaattggcgcgtggcgtaccatttaacacagaaaaatcgatatcaaatagtattcataggtacacaaaaaggaccttgatgacgtcttgtgatcaagtgtaattaccgtctactaagtagatatagtagacggatgagacaacaagaaaggctctgtggctagtagagatggacggaccaccatcttttgactgtaatcatatagtttgtgtaaggctcggggcagttggaaaagtatgggtactccaagaatatcccaagaagagaatcaactttccaaggtcagctaaagtgggatagttataccaggaaccttgttcacggcacgatagtaatcacggatcatacaatgcccatagacgacacaagaccacgggaggaacagataccaaggaattacgatgccacaggtcaatccaatgatcacaaatcctttgaatgtgtcggcgttgcgggcgatgtttcagtctccgccacttggaaagtgtgcgcacatttgcccgaatgttgaacatatcaatcatgtcagtcgaaagcattgctaatcccttccgtacttggcattcatcccaggacacacagcataatggtctctgaagacccttttccaacgccgaaatttcttgcggtcatcccaaatctcggcgatggccctgatatcagccatgatgttcgccccttgaggcatataagtttgtgacgagaaggccggcgtggtctgagcttttgtttgaggctttgggggttatagtgaaggaatcatttctcgaggactggcatttttgttgtcaggccatcaagcctgagggtttcaagctgtgctgccaaagcatcaagccgtttattggcggtcgacaccagagtatccctagtaggaaccgtttcggccaccctgtagacctttggcgaggtgagagcgccgatgttgtctggagtgccatcccttgtagatttttgatgtcataagttctccatgatgaaggcgtcgcgatgcaacattggagtcatctgaatatgagtagaaaacattgaagtcaaagcaggggcaaaggaaaagtcaaaagggaaggtccgttccttctttgtatatatttgaagtcaaccagcggtgcattcatggatagggtccatgacacatccagagacagcgaattccattcacttaaagtagttctcggcatgatatattatcaacgaagcaatgttcaatactacttccattgaatataaagtagaaaaggtggaagaagtagaagagtgccaagtttaaggcatagcccgcacggatcacctgattatctccgccaacttccccggccccttttcagtcaactcccatcccccatctccctacagaaaaatcatatcatgtcggcaaaaaggcgcacgttagagctaggcaatgtcctcgtggtcggaggctgtggctttctggggtggcatattgtcgatcacctgctgaatttcccctccgagaccgaccccagttacgctctgccgaagcccgttggcgatgcgcgcttcgagtacccgactctgaaatcgcgctacccggattacaactccacggtctctgtcgttgatttgcgcaccaccaacaaccgtcttcccggcgctcagtactatgacggcgatatcacttccgtcgagtccatgttggaggttttccgcgctgtcaagcccgatcttgtcattcacactgcctcgccatctatgattgagggcaacaagcccctgctgcacaaggtcaatgtggacggaacacggacgctacttgaggtcgccggtggcgaacatggtgattggggtggtaaatgcaaggcgttcgtctacaccagctccagctccgtggtccacgacacacagagtgatctgaagaatgtgaatgaggaatggccctacatccggggtcctgcgcagaaggagtactactccgagactaaggtgagtttttatcatttttaaacagatcttaatcgggatcaatcactaatcagaccccttgtctttcaaggccgatgccgaggaaatcgtcctgaagtacaacaagaagtccccgaatgagatgctgacagcggctatccgtccggccggaatccacggagagaaggatacaacagtcacacacaagatcctggagcacggatcccaagcatcggatagagtgttacggctgcagctcggtgataacaacaacctgtttgatttcacctacgtcggcaacgtggcttatggtcacctgcttgctgcgcaccgccttctcgcgagctatgaccttctcgcagctggcaagggcgggccccttgactacgagcgcgtagacggcgaggctttcaacatcaccaacgattcccctgtatatttctgggatgtcactcgtgccatgtgggctctgatcaaccgtgtagttgagccggaccaggtctgggctctgcccgaaggcctccttgagattgttggtggcgtcgccgagactgtcatgggattgtttggcaagaccccgcgtctcactgcccggacagtgcgatactcatgcatgactcgctactactcgactgagaaggccaagcaccgcctggcttacttgcctgttgtgcccttggatgagggaattgcccgtgctgttggatacattgttgcccagaaacaagcggacgcaggaaagaaggcattgtaattgaaattagatcatgagattgaaaaaggcatcttatgctgtattaatatgattaattacatttacgcggttcatgtgaccatattaccttaataggaaagtgggccacccatggtttgttatatcagagttgtggatgtgttagtcacgtggaagtgatacaacctcgacgagacacttctcaacaagcagcctatctcctgcaactcattaggcctcaagcctcaatttgccatcacaatgtcccattttgagaagcagtgttctagaatcgattacgtcaacgaaactgggacattgtaatgcccggcatgcctgaagctgggtatcatgcttcattagactcgccatcagagtccatgtcgcttttgctcacaatattctacgttgtagccgactgaacaaccacatgtagagcgggatcgatattctcaggcctctaggcaaacaaacgttcgtcattgtacaaacaaccgaagaagatgttgagggccaggtgcaagtccttggtccagcattggagcctagaggcattcaaatgtaattaccacacaatatcatcgctggaacgacatagtatggttgcaggtatcccgggtcattctctcggatccagtataagaaccagacttgacaatctcaccaacgcggcatccggggtactccatacatacggagtacgtatctgactatatattagaataaacgtggcaattcttatttgtgtggcgtcctcttggcctgttcgcacttggcacttggctcttggacctttggactctctatcctgtgataggcgtgctatggcgtatccgacactacaggttgcgtgctgcatgtgagctggaatatgaatctgataatcaacccttgcatagcttcaatccaaaagcctcgagatacgcctcaacttatttttcttcgaggtttctcttgccgccttcctcagggtctttgtggtctgtgtgtactacgtcgtacatcatggggttaacaggaaccaggctcggagccttccgagcgtatttctttggatacttcatctgtaccgcaggtttcttgtttggctatgacactggaatcgttggcaagtaaagcagaaagcacatgtggttgattcatcgctaacagttttgatggataggtggtatcctcgaattcaagtcctacatcagtgatttcggctatacggaccaaaccaccgtcagcgctgtgatggtaagcttgcaaaatgtaggcgcattcctgtcggccctgggtatattctgggtgtccgaacggtacgggcgaaagaaaacagtccaggcagccatggccgtgttctgtatcggtgtggttttgcaagtggtaccttcacactcactcgtttgtttctatatcggccgatttgtcgctggtctcggtctcggtgcaggcactgcggtcgtcccagcatacaacgccgaaatggcacccaaggaaattcgaggcaagctcggctcgggaatgcaatggttcttcgcactcggtgtgatgctgagctactggattgattacgctgtgaagctcacactgcccgtctcttcgaagcagtggcagattcccgttggtctccagatggtgccagctggagttcttgcactgggtctgtgtggtatgcccgaaagtgtgcgttggctggtcaaaaagggccgttatgatcaagcatgggaaagtctgaaatggatgcgagctagtgaaggtggtgacatgccctgcagagcgatcacgggacataggactaatcagctctcaataggctctgaagtgaaggcagagttcaacgaaatccgagtcggtcttgaggaagagttgcgagcaaccgagggcttcgataagcgcgaacttctcgagcccgcaaaccgctacagactgctcctcgccgttttcatgttttgtggtcagcaatgcactggtatgaccgcgctggcttacttcggcccgcagttcttcaaactgatagtcggtaacaacaccaaccagtcccttctcatcactggtcttttcggtgccgagaagttcattactgttggcatctatatcttattcttctccgagatgtggggacgcaagccgaccctttggatttcagctctattgatggccatttgctttattattgttacagtcgtcaaggaaacaacgccagagcccgatgcaaaagctaccccggctggtattgggatggtggctatgatcttcctgaccaactcgatctaccaattcagttgggggccattaccatggccatacaccgccgaggtaagtaatactatgctcgtctatgaccagctcagccactaataagcatgtagatcttcccaacacgaattcgggggattggaacctcggtcgctgtatcaacacagtggcttttcaactttcttttctcgctcgtgacgcgctacatgatgaattcgtggggcagttatgtgttccttttctatgcgatcctggatatcatcatggcaatcattgtcttcttctttgtcaaagagacgaaagggaaaagccttgaagagatggaaacaatcttccacagcaaggctgcatttgacgttgatgccatccgacgcgaaacgcttgatgcggaggaagttaatgttaatgtacagaacaaatccgtaggcctccctttagggtaacgaaaatagctagttagaagatgcgaaaagtctaaacatgacatttaggcagatacccttggattgaccaatcagagaccctggaatcgctgtaggaaaaaggggcggattcgagaaaaacttgccacttgcacttttccttctcttttatctcttcttaaattgtgaacaggcaaagcgtggatagttctgaacttttaaattgctgatcgattggaaaaggatgggtgagtggacagctatgttacccggcaaagcaggcgaatctatgactgacagtggtgtgtaggttattatgaggtacagtcttttgccttgctcaatagacagcatatctgaccgtttacaagtttcgctgccatttatgtggcgtgagcttcaatgtcttctttcgcctaaggtccggggagctggacttgtctgatcctcaagacggccgattctttgagccagacccgcttgattcaaaggtttatgatgacatggttgaagaccttgactatcaacccccaaaagatattggtgacaatgatccatatgaatatgattccgattacgaatcgaccgatagcatgagcgttgacggagaagatgcgcgtgacaatggagatagcgaagacagcagtactgatacaaatcaagaccccgaaaggaaaatgtatgaccactgggtatggcaaactttcaagcggcctggccttacagatgatttgcttcgcgttggattccttgataacccaacgggcggctattcggtggatgctatctcacctgaacaggcgagcggctgtcgcaccgcccagttcctggtgcataactcactccagagggatacatggaagtctgatgaactacatgagccatgggagatcgatggggattggtctttatccgggatttgtgatggagcgccgatggacccaatagtgtttcccaagcgaaatgggttggaatatttcgaggcagatgatacgttcatttctgtaggtatctatcaagcgcttgttgcactgaaccgcctcaggggcccaacccaaagctgacactggtggaaagcagaacataccaccgaatgaaatagccatgccattccatccgtggtgctttgatatcttctgccgacaatccaaagtccagtttcaatgcatcaatgcgtcagggctgatgacctggcgaaattctgagtttgactatgattcacgtgactcatttcctcgatgcaaagaggttaaaagttcacagaagcagtggtggtttcatcagcctggtaccgagtatctgattgcaaacccccttgacgtgcctggactaccagaaatacttctggctgcggtcgagaaccaagaatccgatgcctcttatgacccatcgtatgagattgaatcgtctcaatccccgacgaaacgccctgtaccatctcacaatagtcaagccgacttcctctctgtccttccggccgaaatccggctcatgattatcgactatttagactctagtgacattgctagtctaaccgttgcttccaaggcattcactgaactcccaaatactgtgtggtatagactagtacgccgagaaatgccctggttatgggaagcctgggatgaatccgaatgcatacacagcccttcgatgtggacaaatatgcaaacagccgagctcaagtccatgatcagattacgaaaattttatgttgagggcttgctggtggattggtacacagagcgtgacgccgagaaagctgctgaacaccgatatcctatgacagtgaccatgccggaccaggtgaaattacctataaggaacaccgactgacgtcgtgttctattgcaaattcaacgcaattgggacatgcttaaggggttgcagaatcgacagcggatctggaccgatgtggaggagattataaggcggattcgcaagttggacgcatagtacaccggtgattttgttcagttagcctgcaatgtagtgaacttgggttttgcaacagtacaatatacgcactttcgacgcttatgcttgtaaatctggcgaaatagattggcagtcatacccaaataggaaggccagccagctcttggcgtcccccgcagcggcgaattgtcggctaatcaccccgcgacggaggtgacggtgaccgcatatatctcatctcgtgttactcctgcacgattagtatcaaaatccaatattttataaatggctgcctctgagaaacgccctgagatcatcgagcttgctcggggactggcaagagtgcccttgtgcgaggactatgagtgtatgatatctgggatgatgtgtgtatcatttaaatccttacactttgacgggacagactgttgacctgtctaggtacaaccccaacatcccgaaattgctagaggcgcggcatttatgtcggggacttgctgcagacttcaacaatctggacacaaagaccgtgacgtatgacaagatcggcgacaagcgtcttgagttattgcggaaacttgtcggcaaaattggagatggaacattcattgaaccaccatttttgccagactacggatgcaatacttcgatcggaaaggattgcttcttcaactggaagtgagtcttcatttccaacctatgtcttgttgaaacttgctaacaattcctagccttacgatactggacaccagtctagttgtcatcggtgaccgtgtacagattggcactggagttagtctcatcaccgctggccatgatactagcgttctttctcgccgtaaattcgtcgagtttggccatccgatctttatcgaagacgactgctggattggaagtaatgtgattgttctgcccggtgtgcgaatcggccagggctcaacaattggagccggatctgttgtcaccaaggatatcccgccgttctctgtcgccgttggcactccttgccgcgtgaagaagacaattcaatcggcggaagaagaggagcaggatcctaataatccgtaccgcagtttggttcgtgaggatcaatagaatttgatatagaatcaaatagaattaccggtagacgaggatcaccacccccgtctctgaacagcccacgtacaaatcccgtatcacttttctcaatgcgtatccctcatgtcctgaatagcgctggcgtgcaaccctggtattgtttctagctccaaagcacactgctacaatggctgcatcacctgcttttttaatcttcgacgagtaacgatccttggaagcgtcgtaactccacataaggttgggtgcatgcaacatggagctacccaacttgcggtccataaagtggacgctgtggtagcttactcgagatctaccaccattgctataatatgaagccccccgtcaagagattggcttatgtaaatgtctacaaggttcagaccagttataactttttttatatcagattaataaagaaaaatgaacgttatacatcttatccctcttgtaccttttgtatcggcgtggcatacaaagtatacgtgatgtgaagaagtatcatccggtgaaaaatcaggagcgcgccaacacctggaagtattgttgtgtgcccggcactatgaaccttgtactaacggtctacaaagagtaagacgtctaattcagttgtgtagagagcaattgaattgttgaggtgtttcctcatgctgactatgaaattctaacagagttgagaaccggtccatacctaaacgagatacctgaagcccttgcgcatacgtagcgactcgtctgggtgatcgatgatgtcattctcagtcgaatcccctctagcaccatcggcaagctcgccctcctcgagctggtggttcaagctgaccaacatcgagcggaaataccagcatccgccgactgtgacaccgaacatggccagcacaattccatagctggagcgatatccattatcttccaagtcccagacatatgaaccagcaacgttgcccaattgactgaaggcattgatcatagcaatggcgacggctcgcttggctggaggacgggggaatgaagaactgatccatgagtagaatacgatgaatcctgcgtaggaaccagcctgcaggaaaagcgcgacgtagcgagctgcggtgttgctggtggccatgcagatgatgaagccgacggctcccataccaatcgggccgatgatatgccagaccttttcttgtgttttgtccgcgtgccatgcattaatgacagagaagatacaggagaagacccagggaggcgcgctcatcaaaagagtcgggacatatccgaatccgagcgtaccagtgagggtaggctatgcagcaagtcagtaaaatatcccaactggttttttgatatgacaagacttacgaagaaagcattgaaagaaagtcccaccacataagccacaaaggtgaacatcattacatagattttggggtccacaagcgccattttcaggcctccaagagccccaagctcttcaccatcggtgtcagcctcgccgacatcctcgagcatgcgaagttgtgcaacctggcgctcttcctcggtgaagccacgcgcattatgtggcaggtcaggcaaaatgaaggcggcaaggatggcgaggaacatggtcactgagccttcaatccagaagagccagcgccacgcggcatggcccatgacaccttgcatgttggataggacaccagcaccaaccagtgcagagaatgcattggagatgaggttaccacagaacaggatggcgttccgggttgtgagttcccgacgggtgtaccacttggagaggataagcaaggcaccgggcaggaacgctgcctcaacgaaccccagcaggaaacggacagccaccatgtccccaaaggtcttagtgcttccagacaaggtggagataacgccccacaatatcatggcgacggaaatgtaaagcgagggccggctgatacggttgatgaacatgttggaaggcacttgcatgatgatgtagccgacataaaggatactcagacatgtagagtagtcagtattgctcagtttgagatcttcctgcagacccttgagacgagcagctcctagattgttcctgtcgaggtagttcatgactattgagcggcgtcagcgatgttgatttgatgtatatgccgcacggcggcgggttcaaacactacacaaggtggtacgcactgtagatggcgacaaaaagactgcacctagcatcaagcttccgcttgagcttcttctcgacgactatccggcgagctggatccatctgagccacgccatcttgctgtggtgaggcaatgtgttcgagattttcaacccgttccttctcggcctcaatctccatccggtcacggttttcccgtgagatatcgtccgccattgtgtgtgtgattgtgagcaaggccagagaatccggggaacagaaagagcagattcttgcatttaagcggaaagactcttctcatggttcatcccgcgctagtatttttccccggtacccccacgcctagatcgtatgtaaatcgtacgcgggggggatactacagtggagttgcggttgaccgactcggcatccgagagcaggagacgtcccgaggaggcatctgattggatatgactgaaggggaatatgagggggggaagtttcaccccgtgttctggtatcggcacgggaactttttagggtcacaaggtcacgggatcacggctctcggacttcactgtctctcacgggacgcgaggaaaacaccgaaaaccccacaaaagccagaagaaaccgggcaaacccgggagagaccggccaaaacaaaggagccaaaacaaatcttggaagtcagaaaagccgatatccacacggaatccgagttcggcatacggcgccaatcccttacaccttccccgcctctccgcagtttgttccctctcttttctctcaccgggatcatgaatgagatcatatccccgcaaagccatttaattcgagtccaatggaatgtggggaaagatatacacaacgtacgatgttgtatgttgaaacgggccatacggtctgaagtacagtatcgtggttgtgacccgggaaaaacttgacaaatagattctcgaccttctctccacttggtgagagtttccgctcaagcccatacggcatttgtccggtaccccacgctcggtctgccgatattttgccgcttcctcagttaagtgtctagtctagttgtttacattgggtagatggacaccggtggcttcggcctgctccgtcagctcaatttcctccacgcggtcatcctcatgccacccctctcggtcgtctttcactagtcggacaaagcacacgtcaagtataagtgctacggcactgatggcaacaccgaagaaaagtgccgctcgatatcccgtgatttggctacccgagcggcgggcaatttgaacctcaatggtagatgcaaagcctagtccgagactgtttccgtatagattcaatgtgccaatcaccgacccggcaattccctgctgatttcgacgcacggagttgctggcaatgatctgaccagccgtgtacacaaagtccgggcagaatgagaagaggaccacggaaggaaaaatctgcggccagtaagattgatggattggtacggtcgccatgagcacattggaaattaagatcgtgacggttccaatggccaggatccattgtgctgccattcgcgggatcatccatgctgcgagacaggcagcgcccgtggcgcagatcacgaagggggtccagcctacggcaaattgtaggggagaccagtgccagactttttgaagccacaacacttggtaccagatcaaggttcctacggccatataattgagaagcacgaccaatagcagcatgaggaaggatggagctttgaagatgtcgagtggcatgatcggctccgcggcatagttcctttcccaaagcaagaagcccccgaataggatgattgagctgatcaggagaacgatctcatagggggttgaccaaccgacactcggtgcttgactgtggaatgttaacatgcaatccttcgggttaatctcaacaacttacttccaaacaaagttgaacaagatcaacgagcttgttccaagagccgatccaatgcaatcgatctttccatgccgatcggctggtggttctcgcggactcaaagcccagagaggagtgaatgtggtaacaccgaggcaggcactgtgttaccaacgcatcagtacctacttatgatccgggttcacggggtctatcacctacatgaagatgaaaaaccacttccattctgtccgctgtagaaaggcacccaaaagcaaggccccaaaatatcctccgactggtgccgacgcaccaaagagaccgagactgagatttcgcacgcgaccggggggattggtgctagatatcatggccaccgcattaggcatgatgaacgcgcctccaagaccagctagagcccgcatcgtgacaaaggcgaagaagttgttacaaaaggcgctggctagagtgcagatagtgagccaggcacccccggctaggacgagttctcggtggccataaacatctcccaatcgcccactcaccaacacgaaggtaccttgggttagactgtatttatgttagtgagatggtgtaatcataaacatctagatactctgtgccttacgcatagctagcagcgatccacgaggcgtaggtgtcgtcaacgcccaatgattcactcaaggcgcttcctccagcaatgcctgcaaaattgactgtcatctgatattgtcagtattggaggattttctgctctgaagaaagttgacggctctgagtatacctgtacgagattagccagaacaagcaatgcagtaatgaccactcgacgcgatctggtcgtccgactgggcagtgcccgctcaaagacaagttggccatctctaggggtcagattgtcttctactgagacctgcgtgtctggaacatgttcagctggggtcgcgggggtcgggtcaagctcttgggccacagtagacgatgcaacaggcttgatgtcgtagtgaagagcatgtaagagcgacatggtttgataataaagggggtgtttcctattctttgtgactagaaatagactaaataagatctcgagtttaagtagacaccatcggagaccgggtccgagctactgagcagtagacgtaactgctttgactcattctcgatgagagtcaccattcaattgggtgtgcattcatccatgtctgcaactgtgattgatcagcatagcggtgctagatccgtgtgcggaaataatccctgatgtacacacattgtacttggagatggatttttgtatcaagagattgtcagacaagactatatcataagcagataccttgctttactttatatgggctggcaatagaagacatgaggtgcagtcgtttctgatagactactactaagttatccgattccttactgaagtcgctaaatatccttccacctcaatatccgccacagcaagcggggaaatttcacaagaaaaaggcttagggtcgatggtgaatgcgaatctcggcgtcatcttgtttcttagtccagcgctcatgataccagcggtatatccctagcctcgaaacactacaccagaataagaatgtggctatttgaattttgttttagtgtcgagcagccagaaatgatatgagccctatagatcaaatccttatacgatcggctgtcgcgcggggtaaatcaccgtccaagatgaactcgtaggaaatttatcctgtctctggaggaatcaactttcttggccatagtattcgaccttgtcgtagtagatgatgtctccataacccgctttgttagctaatatctgctaagcatactggtttgttgccttgatatgttcggtgtatcgatcgatctccgtaggtctatcttataagttcctcggaagtcagtttatgagaaataagaatagtacgtcgcatatgcggtcaggtcattttgtaatcatttcggtggtcttctaagtgtatttttatagatcttccacccattctcaggtatagcaagtctggctatcaaacgaaagctattacaggaaatcctcagcatactcctcatacttctgcatgaagtcctccatgttgaacttatccttcagccgcttatctgatagaatgaaattgcctgtctcaatgtatccttgtcggaatgctgtgaatagtgtcgggctcctcaaataatgtggaatgaaacgtttattatcccctgtcaccattgcccctttgaaagcttgataaacaacacctgggtcctgattaaggtctactgcctcgcattgtccaaaatctaagagatatagctgaacggcgcggtattgaaagtccggtccatgctcctgggcatctatgactgaagttccaagcacaaactccacatcatcgccgttgacggccgcggcccaatgtaaggttgcataggctttgcccatcgcattcgcaaaggggagagtctcaacgccaacttgctccatcgactcaaggcatagagggaagtttcgcagcggaatctcgtgattgatggtaccattttccttgccgagataaatacggataagacagtgcttgttttcagggtggttaaggagggcttccattccagcactatcaagatgctgctcgggggcacagaattgggagatcaaggcttttcgtacgacttttggtaatggaagaatccgttccattattaccaggttcccaggtactcgatgatcctcgggagtttttggtaagattttatcccagaacccgctattctctttcctagagatcaattcgaagggttttggaacgtggattcccccgttggtagactggtaatgttcgaatgcggccgaaacatcacagtgaatcttatactcatgatagaggtttgatggtagcttttcgtttcctggactttcttttttcaaggccagcggcttcccgacctgttcgaagatagctccctgtagaccagctccgatttggttgagttgttgcaagtcgggtcgagaacttgcagtctgagaaaggcggccgaaggaagaggccgtcaagataacagacttctggctgagggtctgtttgagaatttctgaatcggtcatgcgcgcgagatttgatgctgaaaattcccgagaagctctggcattctctgctgagctagccgattcatccctgccattaccttcaaaccgttgatccatagtaatcggtgctgatagatggcttcagttgttgtgtattgtgtattatgtgctgtgtgtgtgtgtgtcatgtagtcgtaatgtcctgtgttctaatcatgacgtccacaggccacgtgctcgttcccttctttccaaggttatgctatcaaagtaagcgagaacgatctcaatagttacgtgtcagagcaagttcaagttaagctcctatggaggtgactgactgtacgtcagagcaagtgaaatgagtataaagcccgatatttatcacaatcctattgagtacagcgtgtttgtcttattatgttcatgtatagtggcaagatatagacacgaatggcacccactcatatatgatataggtagatgggcagatggtcaaacgcccacaaatgtgccatcccttttttcgtttgctctccggccaaatatgaaatgtttcacacttgatttctcactctcttcccttcacttctctgttccattcatctacaacttctttcataccatctcacaacatatcttgtactaaaccacttccattaccttcttcgtgtcaaaaaaggtatataaaacaagtttccacaatctttgattaaccaagctaactagtgttgtcaactggagacatcgactacgatgaaggtcccccttggtccgtcggagcatccaaaccagcttttgcggaagcttggggcccagtatgacccggacctgtccattagcgatgcttttcgtctcgttggcctacggcgaggctggaaacaaggatctaagacttggaagagaaattggaatgcttgcatgaatagcgagtatgatcggttgattggctgccgggtctctagtctcgcaacttggcaacagctatgtgctaaagtgggaatcaaggattccttcagttcaatcacccagtgcaagaaggtaagacgataccactatctattttcaagtcacttgcttactattgtaggccctggtccgtgtccatgtgaacatcgtcgatgttctagattcctggaactccgatgtcaccccaatttgtttcagaaacaaggacgctcttgctgcgtatacccagtccagcaccaagttctttggccgagagatcgcaaagcaggataaggttctccgagttctgttgcgcaagctgctttgaagagtacagcgacatgtcacttccagggatatgatcccggagatgtactgggtgcgcagttcaagtgtggacgaaatcgatctgggaactacacgacaattgaatgtgggaaatttggttttgaatagctgaaatacctgaataacttgttgaaagcgttgtgtttctccatggtatagattatttcgggaggtcctcgtaatgtacatggcttcggtgtccttaaatgctgtcgcggcttcttcatcgtcatctcattacccccggtgttagaagagatatgcaaggtcccgaaactgcaaacgtcagtacggcaagctgagcctactaggcacctacaagacgggtatccaaaacaatagtatgtctgtggccgacaggcaaataagggttccgtttttacctaggcacaaaacaccgagtggcatgcaagctctttccaataacgaaattggaaaacattctctcaaatatcaccatatatcttctaaatacatctgattcaaggtatcaaacatgttgtagtcgctgggtagagaattggccgagaatgcaaagccgaggttattgatgaacagctcatcggggttagaagctgccccaagtccgattacgtcgttgttatcatgttgagtatcgctcgcagtcggaacatcaaaccaattgatatctggaagtgctgtgggcaaaatggtgttttcaacatgcaggtcttttgggtcgggcagaccttggaaggactcagtcggggccatcggccctggatagagatccccgtcttctggttgatatggaattgtgcaaaggctattgcattccaatgaaggagcgggaggcatgtgatcaatatcacagttcagtcgtttgcaatataatttctccagattgcgtccgatacgcttcgcgatattccaggacgtcgagagttcccgcaggacctgaaggcagagtcccacagccgcctgtggtgatggacctcgcaaactctggttacctgtcccagttttcacagtgggatcaacgcaccatctatcaatgatgatcgatgccgctgataggatgcagtgtgtggctgtcatggggctcagtttaaagctgccaaatgtctgtctatatttctgggcgacaatgcacattcctcgggcggagttgctacatatggtcatgactttctgtttacaggcaggcccccattctttgtggcttctgttctgttgtgtctgtgggtctgggggattgccaacatcttgagtggcagagttgttgctcagaaagggcacgcaaagtaaaatgcacacagtatggtataccatgcacaaagtgtaggtgtgaggaaatctggagggaccagattgacggtcgactttgagctctggaggtagatcgtagtaccaggtcttaagttcaagcacacaggattcaaaaaatgagcaacgttgttggggttggaggagtggctttggggaccagcttgagcgatatatgtcagtgagacaggtagatgtaagaaatgacatggtagacttacaatgtaagaaggactttctcgaatatacgacacaggtcaatcattgccctatgcaactgtaccacgtctctttgagaagcggcccttaattgtctattgccatttgctgagggcaaatagacatccgaggcacataaagggaatggtttgttgacgacaccctgggagtcctgggtgataaattaacgtgagtttcgacgcaaaaaaattattgcctgtggtacaacataccagtaacgtgcacaccctccccgtgtagctcgctgacaatttgtcgtgacaatatagagcccaataaatctgccttcgcagctcaatctcgatgggtggaagagcaactgctccggaaaggaccgagggatccatgttgaaacccatgtctaaggccaggcgattggccataccttggtgaagccagccagcagcatcagaccccattgcctatcagatattagtttgattggctgggtgaaagtctgagatatcacacttacaatataagccatgcccatgattgccaaagactggattgttgtgatcttgggccatctgaggtcgtgttgaatcaatctttctgccctatcaagaaatattttgccggctgtgtttgaatcattggggtctgatctcacttctatgcgatcgcagtaacgtgaacctacagcgaggatgcaatttaaaagaagggggctgaagtatcgcccaccacatctcatagattctcgaaacagtttttcgtttaccacctgaagccatggctgttcccactcaaaatacaggtcgagcaagtgcgactgaagctcgtcttctggtatcaagctttcttctaatgactctgtactcccattcggcggtgtttcaccagtctgcatgggagggccatcggactgatatgcctcttcgctgggcgaatctggagatgattagcgaacctctatactgtggcgaaaaaaagaatggctactgtaggcttgccttttgatgaagatctaaatagcaatcgcccacttgtcggtccaaaataccgcacctcgccatcttgatcgaaatttaatgactcgtcaagcgtcaatgcgccgtcaaacgtagtacacaagtcatcaacattcgaggaagccggagcccactcagggttaggctctccattttttatcatcaattgaatggcagcatcagggtcaataccatgcgtgtgcagtacacgctccaacagttcaatgcgattgcgcagcatgactacataggacttaggtgcgggttgccgcccgtcctctgctgtggagtactcgcattgaacgccacggtcaaggcagcgagagcaagatggtcgaacaccatcacactattttaatattagcacaagctttgagtaatacttggtggaacaattatgatcttaccttagctcgtcgttgtcggcatgtctcacaggctcgggacgtatactttctacccggtcgcttgcgcctagcaggttcatccggtgctgtgggcatagctgaggtatacgggaaagaggaatttgatccagtgcacagtagactctagtactttaagcttgagattggaagccttcgactacttgggattcaggaatggaatcttccgaccttggagggttgcccaggtggaatggttgtgattacaaatcaattgcctcaggcaccaaggcataaagtagtcacccttacaattcaggccacagggtctgatgctttgcctcactgcctcacatcatacaacgacttagttatctgtataagctacagccaaatagaattgtggtttaatatttgacctgggagagttgttttcccaaaaagacatattgagaatgcggaacatattgtgggacagaactgacttcgtgtccaaagtatgttgtagttagtatatgctcctatacgtaatgacctctcgtcatgactaggtagagtttcatgctagacagacatgacccattcattaatacatgcctataggatatcggtgcaggctaaatagtgtagtaggaagaggaaagcgtaaagtttactcggggggtatctcctgttcgctccaaggtcataatgaaataaattgtcgtgaataagcctattccatgacactatcatatctatattgaagaatagcaatggaagatcatctccaaaaaaataatgaagccaaaccatcagctgactaccccgcagatgcgcagaatccaaaaaaaaaaaaagaaaaccttcgaaggtcggaaaagatgaagacaaataggtggagcaacattgaatgtggcccccgaacattccgggcctattcataggatgtttggatatattctaaggagagggggtagaattggagtcacgtagaatctccaattgtgataatattgtgctatatgactggctcaggttgatatggatcatgccagcaagggattatgagatcgacagtttctttatttccagatatccgtggaacaagtgtggattgaggatagaatactcctattacaccatttgtttcacagaatatctctctcctaatctcatactatcagatatcagtagtgcaaatgatgcagttggagagggaatgcgagctctcattgtatggggaattaacaattacatccggtggcgtccaatggacttggagaaatattttctttttctttttctttcttttggccttttctattttgcagattcggtggaaatatggctgtccggcatgaagggatatatatggtacgaagtacgaagtacatattacatgggttggatgcttttagacaaaagtactacgtctagaatagtgcttatctagatagtaccaatactgtctgtatatgtctagattcagatgtatttcacgtcctttatttgacatgtcatgacgttgagttacaaatataagatgtatataatacctataggagctctcgatggccatctcccaccacagaagggatcaacaaagtacaaaatcttgatcctatatactatatatgcacagtaaatgtccaggatatcaaataaaggacaagtcaacagaaaaaaaaagaaaacagagagaggtgggaagtacgtagtgcaggaaaagcacagctcaccaatcaccgccctcgactccttcgatttcccccccatcacgactcttcctcttaaacattctctcgacttgctcacttctacccatttctgtgacccttaggtctcaatttcgatccagtttcgttccctttctcgggtcagcctcctctgaggttgacgttgtcgatctagcgcgtcgctgtcgcgccattccccgcagagagacggcttccgttatcctccgtctaacgtttcgtgtttcaacctctgtgttgtctcgaagcctttgaatacacaaatttaacgttggattggtggactgccatcactccgagcttgcattgatctgttcccaagtcttacgacctcactatggacacttgatgctacggatgaatcaataacctcgattaagggcacccgcgctgcccagcagacggtcctgcttggctggaacaacactcttgttttattcaatttacctcgattcatcgcactgtcgccttcctaccccccttgaaccatgaatcccgctcggtcgccggagcgagccagcatggccagcaatgattcccccaaacatacgagtaagtaactaagtaaataagcagataagcctgcccctaccgccccccccccccccgggggggggggggggggggggggggggctcggaatatcgatccgaagatggctcggacattgagtgataatatgcgcgaggaacgtgaggatttgaaggaagcggcagaacagactttgaacatcattgtggatatggacctggagggttgcgtcaaatgggtcagcccatcgtggaagcaggtggtcggctcaccccctgagtcagtggagggccatatgatatcggaaattctgctgggcaacaaggatgtcttccgcgatgcaatcgaatccatgaagcaggatgattcgcggagtcgtttcattcgcttcgccctccagatgggaccggattctgtcctgaagtacgcccctgaaccaccaccggcggctagagagaaccgggccatcggggaaaagacagaggacaacgttgagaagtcccaggaggaggaagagcataatcacaatgtgctcaacatggagggacagggaatcatggtctatgaccggacggacgatgaagctggccatgtgcgtacctcaacaacctcaacaatgtcttgttgcccgccgccgtttataccactgacaccttctgaatacagaccatgtggatgttacgacctcttaccgagcccagagaagtgacaatcgatctgccgcctctgctggttgagtctttgggtgttggggcggaggtattagcgaattatttgaccgaattggctgaggctgcagcgacagaacccgattcctccaagcatcctgccccgaccccggtcctctgtcgcatatgtgaacgccagattacgccatggtggttcgagaaacactcagatctgtgtctgcaggaacatcgggctgagatggatgttcaaatggcacaggaaaacctcaatgagcatcggcatgtcattgtcaaggtcttagatgctttagaggcccgacaaggcagacctttgatcgggggagatggaaatcccatgcccctcccccaagcggagtacaaagggttagccatcggcccctcgtctgccagctctgctccgtcatccggtcctgtttcagagagtaattcagcgcccggcacgccgcctcggtcgcgcgaacattctgcgtccgatgctattccaaaccgaccgcgctccttcacagtgcggagaccactggctcgtatcgtcgaactcgttcttgacctgtgcgatacttcactagagattagtatgccgatgatcaaggaatcttcccggacagacacagaggacttccggacgctgtcaccacaatctgaatcgcggatctctcaggttcttcagtggcagtccccgagctctaacaccctggaacaagaacagggtctcgctgctttgtcggcagacactgaacaagtcgccaaggcaaaagtggatgccgttgtacgtcatcgcaagattgttgaatacgccgaacgaattcgcatagaatatacagtcctagtcgaggaatgtattggggcagcgctaagcaaggcggagcgcatagctgctggtcagctcagtgattcatcttgctcatctgatgaagaattggcgcctgagagcatcatcgacggcaatattactccgggcgatagcaatactgttgccgaggaagattccccctcacaaatcatgagccaagaaccgcaacaaaggccctgtccagcagcaccctctccgcggcgaccgacatctgcgctgactctgtcaatgcgtaattcgccagatcggtctttgctctcacaatcggagcgcagaccatcctccgcagcagtatccacaggttctaacagcccattggaatgtcctaccccgcgatcctataagagtgctgcaggactcctgggtacctcacagccttctcgactgggcctttccctatcggaaattgatgctggtgagactagcgacagcagtttgccttctgtcttcccgggagctataagaacagagtcaccctcatctgagaggagcttcgatcgaaagcgtcggagcctggtactgcctggactttcgagttctcctcgtcggcaaccttctcccgctcgaatttcaggtccgcattccccgttgcgcatgccaaagccccgtatgtctagcggcggtgaaagcctgccgtccccgatagcatctccgtctgcatacgcaagtgaattggcccttcatcactgccgccaccatcgccgggagtcctcggcgaattcttcagatatcacgaagcccccaccttccccacgcctaccttcgatgagccagcaacagcctcggcctgcgccattgtcgatccgcgattttgaaataatcaaaccaattagcaaaggtgctttcggcagtgtctacttggtgaaaaagaaggccactggcgagtattatgcaatgaaagttctgaagaaggccgacatgattgccaagaatcaggtcaccaacgtcaaagccgagcgtgccatcatgatgtggcaaggggagagtgactttgttgccaagctttattggacattttctagtaaggattatctctatttggtgatggaatatctcaacggaggtgactgctcatcacttgtcaaggttcttgggggtcttcccgaggattgggccaagaagtacattggtgaggtggtgcttggagttgaacaccttcacagccgaggcattgtgcatcgcgatttgaagcccgataaccttctcatcgaccaaaagggacatttgaagctcaccgactttggactttcacgcatgggattggtcggtcgtcagaagcgggtgctgaagaaccccgatgagtctgctccggatctactgaaacaaaatgcattcccccgtgcgatatcgattggatcttctcgatcggcctcattcgactttcaagcaagctcatcacctggctctacaccactcatcaccccggaagtgtccgccagtgccgttcagccatcctacttcagcctcaaccagaatagtttgagtcggcaaagctctcgtcgagcttcgggataccgcagcgatagcatgggcagtgatggtctcaatggaatgttcagggcattctcgcttaatgacaatacacacgaacctcctgtctcatcgccgagtatgttttcaaccagcatggttgaagaagagggccaaagcgaggccggcgagtcccctcgtcttcaacccctgcatccaacattcagcaatccattggcgcagaatacccctccccatcaaagcatgatgcctccagtgatggctctttttgatcccgaggatcacaatcgccgttttgtcggtacccctgactacttagccccggaaactatcaacggcattggccaagatgagatcagtgactggtggtcattgggatgcatcatgtttgagttcatctttgggtacccacctttcaatgcggacaccccagatgaagtcttcgaaaacattctccatcgcaggatcaattggcctgaggatgcagaggagttgacttcagcggagtcgttggatctcatcaacaagctcctggctctcaacccccgtgaccgaattggagccaatgtcgaagagaagttttcaaatggcggtgcggagatctgcagtcatccttggttgtctgacattaactgggacacactgcttgaagacaaagcacaatttgttcccaacatcgaaaatccggaggacacagagtactttgatgcccgtggtgctactcttcaatcttttgcagaggagttggaagatgagaactcaccacaaacgtcagcttccgctggccccgaccgacctcatgatgcactgttcaaggtccgttctcaagtcaattcgtcgaaacgacctttgatgccactgcacattcctcctcacgttcgtgatgctcgggattcacgaagtcggagactgagtgaaccagccttggccgatgattttggcagcttcaactttaaaaatcttccgatgttggagaaggccaacaaagatgtcatccagaagatgcgccaagaggctctgcaggcacagcaccgacaacccagttcgtcgtcggccgctcagacctcgagcacttcatctcagccgtcattggaagggagcccactgccaatgtcactccagcgaactctgtcacagaacaagggcaataatcgaccttcttccccatcaggcctaagtcaaacaaactcatctcccagcaggccatcgcagccatcttctcctctcctagttcagttcagcactgggaataatcaagagcggcgcaagacgtcgggctcctcgtcagcctcctaccaatcgagtggggcctttcagccttcctctgctgaccagggccgcatgccaaatcttagattgggctcagtggcatcctctcccgtgaaatccaaccgaatgccagctcactcccctgacaagacgggcaacaatcaacgccatggcagcgtcccagcgagccgtacccgttctcacaccattggctctcaagatggagatgtttccgcgttccagaaagaaccctttgtgccccatcatcctaagcgccggagtcagctctttgatatctcaccttcatcctccgacaatgaggatccacgcacgaaggcactcttgaaggtccaacgccggcgacaaagctctcgacggttgtcgcaaatcaacatcctagaagggccctttttccggccattggatgtgctcatttgtgaagatcaccctgtctcgcggctggtcatggaacgcctgttcgaaaaacttcgctgccggacgatcaccgttacgaatggcgcggaagctgttagatacgctctcagcgaggttcagttcgacataattatgactgaatatcgacttccccaagtcaacggagtagactttgctcgaatggtacgggagacacgcagtgctaaccgacatactccgataatcgctgttacgggctacttgaaagacctcccggagaatcacaacttcgacgccctgattcaaaagcctccgacactacccaagctgaccgaggcgctttcccagtggtgcatgtggaaacctcctccaacggactatgttccctcccaacctgttcctgttcctgttccgggatctaatgctcggtctaccgccgtgatgaatgaggacagccctagttccgcatcctctggatttgtccttaatccccccagctctcaccgaggatcaagccgcgaagattcgctcagcagcagtgtgttcggagacatggagtctttcaaacccgaaaccaaacccgaggacattcctctgatcataaatcgaacgtctgatgattgggatcaaggccacggtggattagggatatccgaagagccaatgaggaactctgagaggccaaatcccaactctgtacctgtgcctcaccttcttcatgctgcatcagcgcccgcggccatggattcaagcggtgaacccacaccccggaggcaaccgtcaagtgaagctattcgcgccaaaaaggaatccatcgaaaagaagtggtacgagggcgccgaatcgggtgacgatgaagacgaagagcttggaaactcccaaacacgtcgcagcccaccctctcgaaatcgccgcccgggctcgaaactggggattgagatgatgcggaccaacagtcggggcagcgttgttagtggcagtgaagaactattgaagaaggagagggaggctcttcggaaccaagccgcggagtccacccataacggagacagcgatggctcttttggttctcctgccagtacaagcttagaagatcgttttgaggcccttagcatccccgaagaatcggagggtgaggagccacccagtcctcgtacgtccccgacaaggcttggagcacctgtctctcagtatcaccggccatctctagcgcatcgggatacctcgatctattctggaatctctccgaattgtacatcgaagactagcccaacattgttgagtcagggtcaaactacacccccgtcggactttccgccgaggactgtttcccatcccgctgtcctgccaattacccctgaagtcaaaatctccggcagcgcgctgacccgagacgcgggttcgggcgtggacgccaactgtagtcccaccccggacgctgaagctacgccgcgacctcttcatccttcccctaacctggatccggagcagacgcctcgtcccccggagcgacatcgatcggactcgagttttgccttcaaaagatgatcttgcgatatctttctattctgtctacatattatctgcacacctacttttgtcttctctgtaaactttcctgtgtttatctatcccggggaaaccttgtaccccgtggatacattgtcatatccactccctcacgtctcttatgtctgaatgttttctttctgaatctcggagcaaggtgttccggtctttcgttttacttggcattgtttcatttcatttcttttctttccagtctttttttttttttttttttttctcagcgagaatagtctctgtttcaacatcttgaccatgtggtggaaattccaacatcagcttgacgctgtttttcctttttcctttttgtgttttatagtttgttaggataccctgaggatcccgaaatattatcttgtaccagtaagggtacttgtcttgaagccgaagcattatttaactactagcgcttcacagccacctcccacattggcaatcggcgatgatcgctccgatcaagcgttctgattggacacaatcctgattacttgtgaagatcttagacaagacctcggttagtgagattaatattatcttgtccagagtttaccgttttgtttttctgcatccaacgtacaaagtacgtgatgatcgcaaccgtgcataagatacggagaatagctcgaacatggagagcatggactccgtaataattggtctaatagcgcaccgagcgccaagaggtcatgaaaccgcctcagtgcgtaagtcagtgcttgcgacgcatgttgtatgtacaacgtcactaaatcataggctcggatttcttttggtttggaagggcaacgtcatggttgtatcacagaacacctggatgtaaacattctatactctttactgtttactgttttcctagaatatatactgtatgttgtatgaattgtagccaccggtgtttacatgacactctacaacacacctaactaggttggaggcgtcctgggcgttcatgatcactataagcataaagccagtctaataatagtctgacaatatatattaaagttgctatctatcacagactcggtgttctccttttatgaacacaatttacactttcaagtcaaatccaagacaaaatccctttctcgccacctggtggatcggcaaaacgttggcaagccgtgatgggccacatttgtctcgaagatcattggcagttgccctgcacattgcgtatgtggaacatcttatttgactgctcccaaggttggtggttgaaatagaagttggaatggagttgttgtgtgtaaaaggtacgttggctgcgatagactgttgtatacaatgttgtataccacccctatatacatcccaacaaccccttatttgcgagtcgcgatgctctaaatgaaggcaattaaatctaaatcgagttaatttcccacaaccaatagcgtatttataaaaccgatcgagatcatcgtgaaatgtaaaagtccaggctctgcactgttatgggtcttccccatcaaactccacttggccatgtcctcttctcttccttcacactctctcgctgtgttcttttctgcctctctgctgtcttttttcttgtttgcttcggttgcgatgtcatcgagacgaaacgtataatatacattcaatatacaatcccccctcggtcactacagagtacattccagtctttcctctccgccttgacagaatttcgctcatacttggcccggtgccatcatgtcgtcccccgtggaggaacgaaaagcccatatcgaagacaaggacaagcgaaaacactcggacgtctctcctccctccaatgatggcacttatgtgaccgagcctgacgctgatcgcgacacgggtcacttgaaggtcgacactacacattatgagcatgatgatgatgggcatccgccaatgcgcaccccatccgcccgtcgggagcaggccactcgtctggaggatgatttgctggtcctgcaggccgagcgtatgacctcgcattcgaccggcgcaccagacgacgaacacgatcgcaattctatccatcgcacccgttcgcgacgctccgaagccgtcgatgagtttgatgaagctacaaatcccctgcacgaaaaggccgcaatttacaaacccccggagaatccaaacacccagtttgccgtctttgtgaagaaactccatcagtcgagtttcctcgtgcgctacttgacctacattgcccccattgtcctcattctcttgatcccgttgctggtcggcgctctcaggtttcccaatgccagtgtcggcggtgtacaattgctgtggttttcaatctggttggaaattgtctggttgactctctgggcaggacgggtgagtccaatcaatgaatcatttcccaacgagcattactgatctatttcctttcttaggtggctggcaagtgcttgcctccagctgtcggtctttttgcgagtgtctttaccaacaacgccaagaaatggcgcgacatggcgaaacagctcgagtttcacgcggcgctctttttctggtggcttggcgtggagatctctttcctgccaacgatgaaaaaccaccatgtggatggtgatacggggaccaagggatgggaaatcactcttaacaaaatcatcattgtcatcttcgtgtggactatcctgaatttcatcgaaaagatcctcatccagttgattgccatcagcttccatatgcggacctatgcggaccgcattgagatcaacaaattccagattggcagtctgtccaagctgtacgattggtctcggtccactcttactgagaaagatgaagcatttgaggagaaggacgacgaaccgagttccacgggagtcaagaccccgttgcactatgctggcctggcccaccggaaggccaagggtgccctgaacaaagttggaaaccgggttggcgatgtcgcaggcgcggtcgtcgctgacgtcactggacgcgcgacgactcgcagcaccgatgcctatcaggtcattttggcgctcctgcgaactaccggaggctgtcaggtcttggcgcgtcgtctgtatcgcacctttgtgagggatggctttgagaccgtttttggtggtgacttgaaagccgcatttgaggacggcgaggaagccgaagctgccttcgctatgtttgatcgcgacatgaatggtgatatttccatggaggagctggaggccgtttgcgttgacattggccgtgagcgcaagtccattactgcatctctcaaggatttggattcggttgtctcgaaattggacaatgtcttcatgttcttcgtgtttgtgattgtgctgattgtatttttgtcgctcatctccacctcagccgccggtgtgctcacatccgcgggctctgctattctcgcactgtcctggttgttctctgctactgcccaagagttcctccagtcagttgtcttcgtctttgtcaagcaccccttcgatgttggtgaccgtgtgaccatctacggtaacgctggagattccggtcttggtgatgattactttgtgaaggagattactcttctgtacaccgagttcaagaagatgcaaggccatgtcgtgcaggccccaaatagctacctcaatggccttttcatcctcaatcagcgccgttcgggcgcacttgccgaggcggttccaatcattatcaagtatggcaccagcatcgaccaactcgactccctgcgccagcgcctgttggagtttgtgcgtagcgagaaacgcgacttccagagcaacatcctcaccgaaatgcgtgccgtcaccgagaacttttcgctcacactcaacatcgtcttcttctacaagtccaactggcagaacgagggcctacgtttgcagcgccgcaacaagttcatatgtatgctcatggtcgccctccaggaaatcggcatcgagggcccacgcatgaacctccaaggtgccaagttcgacattccgttccacgtcaactatggcaatacacgctctgccgagcagcaagcccctatcgatgccgacccagtccccatctcagaagaatctcaccacctgccagagaataccggatccagcagcggcagcgctatccgtcacccatcgattcttcgcaagggtatgaacactgccaatgcccgtgcacgcggcccgtctgtctcacagcacaaacacgtcgacttctccttgggcatgtccaacatggcatccaacgatattatgggagatgtgtttgaggatcggggtgtggtcgtcggtgaagtcgtccggtcggccaaccgcgatgctgcagaccgccgcatccaggaagagaacgaggacgaggaggagcgcaagagccgtacatcttcttcccggcatcgtcgcccctccaacatgagcgctccctccaatcatgatgacggtcgccggtcgaccgacgctcacagcttccgtagtggccagtcatcgctcagccgtaaccggttcttccaacaccgcagcagcgtaggtcacgatcgcgatgacttgatggagcaaggccgcgtcgatgagcctactcctccgccaccggccacagtccctggtgccaaggagcacccatattgatttgagatgcggtcattttcaatatcgtgccatattcactctcccagtgaccaatttgatatcgaaaacggctgattgaacactgcccgctgtggttatcttttcccctagcctctttggttcaagcgcagtatgagacatgtgtctgcaatgaggtcggtggtgaaaccgcgacctaagttaaatctcataggttcagacatgagaaagattccagtattgaagcgaaattgcaagtggatgcattgcaaatctgtgtgaatatataaagtctacttgatcagagaaacaccacgctacactatatatattttacaaatttcaagtcgccttcactgtattctagctagaacaccaatgggggaaatatctgaaaatacaagcctttcaagagtttcatcggtatctccgagaatctgctttactgtctttgtatggcgcctttgccccgttcctgctctcctggagatctgtccattcgattgacgaagccctgaatttgatcgacaagtcgaaggacggaaaaaaagtatcaaaaaatcaaatcaaattaataagtattatgtgacttttccccttgttgtataaccaaaccttgaaccctctagtgataacgccatgatccatgcaaaattattactagtgatacaagtcgaagattcccttcaactgtcagcagcgacattgagctcttgaagaaccttcaatgtgtgctcataggtccacatcgtcaccgcacttgccggtgccgccttgagtaaactgaccgtcaagccgcggtacaaaccacgcacaccctgggtgcgaacaatcatggcaatacttcggaggacgccgttgtactcagggatatttcgatgaacgtaacgggtccttgttggaccctgtacctgcaagcgctttcgcacgaggtctagggggaaaacacccgtcttagccagtacactggccaccacaccggctgcggcatcgcctgtaccaaacggcagatcctcccaggtcatgactggtctaaccgcctcgtatgttgtgaaaaagagtcccatgtatggcacaatttgtgccacagcggcagaacacccccggaagaatcctggtgcgccctcctgccgagcgatctcaacaatcgaggcgcgaagcgagctatacacacggtccgggccctgcgcggcaaatcgcgtgcggaggaggtcaagcgggtatgtcattcccgtggcacatccgcctcccactgcaccggaaataaaggattcgacaggttgggggagtctgtaggagccaagttgggcgagggcttgggttgttcctcgatacgcggtgaattgcatcgcaccatagcagacatacatcatttcggcaggaatattgcccttccaaaggccctgtgagaacaaatcccagttagtatattgacattaatgtcgggaagcaaggtaatattttcaacgtacagtgattccctcttgcttcataatcgtccgcatagtggacaatgtccccttataaacaggcccattgacactattatgggacgcagggtctgacagcgaatggatttgcaactgcagtctgatcttcacgacgtctagcggcgcaatacagaaccgcgagatcagccctgcaatcccgccggccaatacgacctgtcgcttggtgccttcatctttgagatgttcgccaccggccgacatgagttgaaagtgctttctcttacagactagagatgtctgtatggtggttgggttaggttaagaatattgaagcatgaagacccatgttgagtcgttgagttcaccttgggaatgtttaaaaaaaaaacaacaacaacgtcaattgggcaatttacgtaagttccgggctggccctggcgaagaatgataactatgtttgcctgaggtataaatattggcctgaggtgtaatagtatgcctgaggtattaatttactgcctcaggcaggaacgcatactattgaagccgaggtaacttatagcttccctccatttgtcccgcgtgctccgcgaggtagattttgctctccctctctgccatttcactgattaccttttcttcttaactggttcacgggcccttcatgcatcgtctccgagcttcagctaccttctggcaattgccaagggccttattatactctaccccgcgccgtaacttcatagctaccccgagtaggttcaacagccccgtagagccagactctcacgacaaattggaacctctcgccccaggaattgaccatccacttcccataccacaagaccccagcaactctaagggggacgtgccagacctcacccccgaggtggtgacaagaaaaacccatgggaatggcatcctaaaagtgggcaaaaaagagtcgatctggactggaaaagaggaattgtacttgcatatggacaaatacacaacactcaaattgccatatacttacctgcgcgattcatgccagtgtgtagtgtgcaaggatcaacactcgaagcagcgctcattccgcacaagtgacattcccaaggacattgttccaagctgggttaattgggatgggaacaagctatcaatccggtgggacaaagacattggggggtcacagactgtacacgaatcaacctgggcccgtgactttctaaagaatcccattttcaacactcatgatcagcatcggagcgtgaactccaaaccgatcatgtggggacaggctaaaatggagaaaagtcaacattgggtgtcttacccggactatatcaccgataattccaaacttgccactgcgatgcaccagttgcagcgtctgggccttatttttgtgaaggatgttccagactcacgatcgatggttgaagccattgcaacacgaatgggaccactacgaaacaccttctacggatcaacattcgacgtgcgcaccgtcccagaggcaacaaatgtcgcatatacaaaccagttccttgggtttcacatggacttgatgtatatgaacgagccacccggataccaactcctccactgtctgcagaactcctgctcgggaggcgagtcactgttcgccgacacattttcggccgcgaaactcatgaaggagcaatacccaaaagagtatcaagtgctaagcgagcagcggctggggtacgagtacaggcacgaggaccacatctactacaacgaacgacccgtctttgagcatgattccgacacagacgagctgcgccatgtcaactattcgcccccctttcagtctcccctcccgaatagccatgatgctgagcatgtgaacaagctactagatgcgcttgcgaagttcacttcgattattgataatccaaatagcatctttgagctcaagcttaacccgggtgattgtgtcatctttgataacagaagaatcgttcatgcccgccgccaattcaatgccagcgtggggtctcgatggttagcaggcgcatatgtcgatacggatgctctgctatcccgctttgctgtctgtaagaatcagcatccgtatgtttggacgaaaaaggcacagaaagagttggcgggtaacaatagtggcaacaactagacaaggagtgaaatataaggaaaataaagaggtcaagagggtgggcaaagaggagagagaggcttacaacacaaaaggttgtatagtacaaaatatgaagatcgattgacccaatatctgaatcgtgcccaagagttggcatcatttccttctttccagcagttgatcgaatatacgaaagtgatgttttgttagtttgggctgttccaagttgtgggcccatgatccatgcctacatatgtacatagaatcaaacgttgtaaatttattgtattgatattcttgagacccgagtggaggtgcagtgcagtaattcaacatagtcattgcggtacaaggtaagttgaactaccggtgcaagcatctgaagaggatgtgttgaatctggcatggcccacagggatattctgtgacaatgtactggtttgattcgacgctggttattccaatttatagcaaggacgtgtcccgcaacattgcgaaggatagatatgatcagacatgcgtataagccgtatgaagacaaaaacgtttatcattatgttagactttttagcatctagccccagagacagggggtcatgggtatcgtgcaacgatcaaccaaccactcaggcagccgcggtgggtttgttaactgagtgatcattgaggaagtcggggtcgctgttgatttcctcacggacctataccatagggttaataatcgaatcaaagaagtggagtgtgacggaacacgtacaatatccaagccacccaccaattccccgttcacccacaattgagggaaagttggccactcagcgtactccttcagaccctggcgcacatcctcatcggccaagatattgaagaagccgtacttgacactacgctcgcgtagaattccaaccagctgccgactgaatccgcattgtgggctgctcggggttcctttcatgaacagcatgacagatgctgcgttgaccagttgctcaaggcgggcaaatagtgcctcccgggattgttcgggtgtcagggtgggggcagacgcgacggcggttgcattagccgcatcagcagaagggggctcagcagcggtaacaggagactgagtagcagtgaaggggccatcctcacgagcaacagcagatagcggcggaggaatgttggctttcacaccgtccatcggaccgacggcacccgcgacatttccgcggccagcgtggcgctcgacagcgtcacgaaccttgacggcatcacttccactgatcgactctaatatttggccgctgcgtaagcacacaacgaacggcacggctgaaacgtcatactcttccgagatgtcaggtagctcctcggcgttgatgctgacaaacgagatagtgggcggggtagtggcggggtactgcgaagcgagggctgagagtactgcgcccatctgcgcgcacggggctgcccatggagtatggaagtataggacaactaatgcagacggcgatagggaagaaagatgcgaggagaagtcggcctcagacgtgatttcgatgagtgtcgacatgttggatgtgtgaaagaatgagacaactggaactgatggcaaagtcgggaatcggcgatgagaggtatgcttcgaaggcaagattgagcagtcaaggcgagcctaaagtcaagaagcgaagaagacttgtcagaagaatggcgtgatggataccgaaaataagccccagatttccattcgggttatcagatcgtttggcgtctctggcgcctctggcgtgccgtgtggtgtatgtaagccggaaaagtctgcgacacatattatccgatatacacgtgatctcaatcaacagcagcacgtgaccttatcgcgtatcatcatgaatttccatgccgcgatgctgtgcggcgaggaaactgcaaatccaaagacaacatgggaaaagagaggaagagaaagcttagctcggacgacccggttggtcaaccaacagctcaggtattcggtgtcgccgatacattgtcccggttgcagagcgataacccgatcagcgaaggttcgaacggcagccatgcgtcaaaaaagcgcaaaagagtcgacggcgagaaagtcaaatacccagatctcacatacgtcgatggaaaattagtgtcacctattcgaatcgccgatctgcaggggttgcttctctattgcttcgccgatggtatcgcaccccaatggatctccgtgaagcattctggccatgtgcgcaaggtggttgtactgatggtacctggcctcgagatgggcatgtttgatgggacaattcctgtgcaacgtgcatcagtcaccggggagcaagaaacacaggagcccaagatcaatgcgccggaagccaccgaggaggtacctaaagacgaacacgctgctgattacgagagatggaagcagggcctcccattgccggatcgctcgcatcgcttcaatcctcgatctatcacacgggaaaacctccctgaaccacttcagcccctggccgatatgtttccccatatctggcctgtcaaggcgccaggcgacaacaaatacaacaaggtccattcaccactacaggcgattcttatgtcctcgccccccaagacaaaaaatgatgactcccgtgcgaagggcgcacggcccgcaaaggttgagaaaggcttcgttccgaaacgaacaccaatcacagcttttgtcacttcacgcgaggatctactggaaaatgactttatcttgcaccctgttttcttctcttccgatgaggaaaagtcttcccagatggaggctcgtcagcgaggcagtcagtcggtggaagatggatgggtggatactcaagttccaaccctggagtccgctctaccacctgatattgaaattgagagtggcagtgtgactgttggtcgagatatttttgcgcttgactgtgagatgtgtattacagagggaggtcagtccgaactcacacgcatcagcatggtcggctgggacggcgaggtggtccttgatgaactagtcaaaccagcacggccggtgatcaactatctcacacgttactccggaattaccccggagatgctcgagcccgtcaccaccacccttcgtgatatccagcaaaggctcttgactcttctcacgccgcgtgcgatactcgtaggacactcccttaattccgacctcacagcactcaaactggtccacccgttcattgtcgatactagcatcatttacccacacccacgtggtccgccactcaaatgcagcctgaaatggctcacccagaagtaccaaaacaagcagatacaaaacggaatggccgggcatgactccgttgaggacgcccgtgctgttcttgagcttgtgaagttgaagtgcgagaaaggcgagcgatggggtaccagtgattcttccaatgagagcatattccgtcgactatcacgctctactcggcctagtcatctccctcggcctggagaggaacgaacaggagctgtggttgactggggcaaccccgaacgtggctttggggctcaggcaactgtctcgattggatgcctggatgacgatgcagtcgttagcggtgtctccgcggtaatcaatggagacgagtcccatccctctattccaggaggtggtgttgactttgcctgggctcggattcgtgatcttgaatatcttcgcggttggtgcagccgcctccctgatccaaacaacgccaacgaatccacaactcttttccctcctcccgaagaaacaacgccgaccacaacctctggcaatggggactcgacagatcttccgcggcctgacgtcttggctgatactctttcccggaccgtctccaacatttcgcgaatttacgactctctcccagcttgtacgcttttcatagtctattccggtacaggtgatccacgtgaggtgggccgtttgcaatccatccacaagaagcaccgtgaggaattccggtctggcaagccatgggatgagctgacatacaaatggaccgacgttgaggagcaggctctaaagaaggcttgcgagcgtgctcgcgaaggttgcggttttatgtgtgtgaaatgatttagccgaagctacgtatgccacactccaaatgtcctacgctacgattatgattctcatttcgcttccatctctgttgtatgatcgtctacaactgctgctaagaactcgatgtgcatgtttccttacgatagaatagccaaacacccagtaggatccaggtcaaacacaaaaaaggttcctttggccactggaaaaaggggtatgtaaaactgcagaaagaggacttgatatatccgaaagtgtgaaagattgtccgagtagcttgaagtgcaacctcagaagtcataacactttcattcacgtattgtaagctactaagttgcccatccaatccgtgttctgtatatatcccgtctggaatatcgggctgtggaagtccccacaggaatttgtggggcggaggtgggagatttctcccgacagcaacggacacgaacctttcgcccttagcaatgaatcccttcaaacgggcaaccgcagcctggcatcctgttggtcttgcatccgagtttccgagcatcgatgacgatgcccggattgtgccaagatgcaaagctttcaatattcccaagacaaacgacgccatagagcgagttgaagacattgacctaccaggagaactgaaggaccaagtcctggtgttcaaatacaagggcaaataccatgccattgatcatgtaagtcaaacggtttttccaattggaagcattgagctcacccattctagcaatgcccccactcgtcgttcccactttcacaaggccacctctttgatattgaagacttcggcatcgtgctcagcgcaggtctcacatgtcccaagcatggctggtcatttgatttattctctgggcgtgctgatcgcggcaactacacactcaaggtgtgggaggtacagctgcgcgactcatcggcacttggaagtacggaccaagaggtttgggtgaggcggaaacaaagaattggttaacattggccattagcatcgtccaattttccttagtgacttatcataaaaagtgcaccaaggctgagttgaccttcctggagtgattgaatttagcaggccatttaagctactcctcgcaacttgttcatctaactatccatatcaaagtattcatatgggtagcctgtcgatccctgctttagattttggctcgaatgcgacccatcaactttgtggagctcgggtagttcacgaagtagtaattgcacgagggaagaagcttgtctccatccaggggtaaattggtctcgagtttctacccaatcacttaatccttggacagtaggccaactatctgtatattgtatgcaacattcagccccatctgtcaagcattactcatttttctggcagccaattgctgtctataaaagcaccaaaatgtcacacctagcgcctccattaggatgaatcccgccaccatctcgatgcccaacgagtcacacccagtcaataccatgccaatcaaaaggttcgcacacccgccgaccatctccattctacccacccaaatatgagcgtacgagacccatgtccgggcgcggattcggacaaaggtaacatgatgccaccagcctagcagaatctgtatgagcagaaacgccacaatcattccaccgaggaactggtgagtgttgaagatcgccgatgccttcgcggaatcggaatcatggcgcttgttgtgactgtgaccgtgctcgtgcgcttgattcaaggcgataccggtgcccgccccgactatcatacaagtagttgccagcccctgcaagatccagtggtaggtgaacgagcgtggcgagccacttcgcaaagcgaggacgccgacaggaagaagaaagaggaagctacctgccatcatgatcccgtgggtcatttgcaagagcgcggtggccttaaccttgcgccaggtgttcgctgctgtagcagcgatgccggaaatgccgatcggagtgtccgaggcgcccaaagcctcgatattgggccgcagtggtggaaatgagggatagtagtcccccggctgtgtcagagagcgggccatgtcgacgtagaaccgtacccagccaccattgcccacgtggtgtgcatacatgtctaatggtgcgtcaaagctgtacatggggaatttctgctggttgttccaggcccttatccagggttgtgaggatgacagaggcgatatgggcgacgtaggccagcgagcacaggagtagcagatcaaggacaagtgggcggactgaggcctttgacttttagcaatggtgtgttgttcatgatgcatggatggcaaggcggacatccaagaggtttggagaaggcgaagatcggctccgcccatgtcgtcgtgggtgatcaggcgaggctggtgatggccatcgacggttcggatacttagcacgggattctcactggattcgggatccccatagaggataaacatcagggagcctgccattagagacccggtgccgatggctgtccatccgagatctgagtcgcgagttattgagagactgaggtagatgtcgtgggtggtggtggaggaggagttgaagtgtgtcgaaacacccagacggaaattcaccttgtcttccttagcatcatgatggccaaattggcagtattggacgggttcagcttggcagaccttgtctacaaacagcagaaatagagggaacgaaatagaccatcaacttcatgactagacattttgatgcattctgaggagatcactgtcgccccatgcagttagtagacctctccgtgcggcattcctttccctttctctttcttcctctggcagacaacttgccggcaaacgcgcagcttggcgcgtcggcgttctctttatgtgtctgcagagatgcttctcatgtgttctggtagatggaatctggcttgctttgtggtgcgaagctatatagacaggcttcagtacagtagctagtttcgtatcttccatcaacatcaccttttgctatctggttgatcacctcttccctcgtagtcagaacctctcatcacattccttgccaaggagaaagaggatgacagtgaaaataacatattcatactagcctttattctttccgaaggaaaaaagaggtaatcttgtctttttatgcattgatgcatgggaatgaccgtgcatgagtgaccttacaggctttggtgcttggcgtaattcgtatctttcaataacgattcagaagacagacgacagatgtgagatgtgaggtgtatcagccataatctatgcaatggagtgggctctgcttttactctgggcattgctaggggaggcagttgccaacatcccacactatcagctgacaagctgtaccaagattccgcccgaatggactcggcataggcgagctcacccggacgagatggttgacgtatcaattgggctcgtccagaatcgattacctgagctcgaggagaggctcctacaaggccgacatcctgtatcctatggaataagcatatctcacacacctcttcagtctctgacccttctcatccagattatggaagacatctctcagcccaagaagttctgcacctcatacggcctgtgccagagtcgattcccaagatccaagcctggctggatgaattacaacccctgaggggccaatatcacaatatctcccgccggtgactggctggatcttgctatgcctgtctcgtgtcttgagcagctactccaaaccgaatactgggtcttcgagcagccggggtctgggattcgagcaattcgctcacacgaatggtctctacctgctgacttgatggatgtggtcgatgtgattacaccgaccaacgtttttatccacccgaccgtccaatttcgattgggcgcacctactccaatctgggaagaggaaagtcatctgccgatgtatcaagacctcatcgatgaagatctattagatcgtggcagactggagattctgacccaggaggaactatccgcgaatcccacaggcgactggtgccaccggtaaatcatcaccatatctttatgaaatctaatttgcgcaccctaagatacaatgtttggattcagataccacacctttaaccgcagtcgcaaccgtttcgcaaattgtcctcagtgcgacccacggtgccgtcagcggtgatgtgtctctctaccaacgactgaatctactaggtggtgcattagccaacatcggtgccaacaaagcctgtggtacgtgtgttatctatctccttctttttctcactccccgggtataggagctaatatttccgacagaactaatgggtgactttcgcgtgggctttcttctgcaaaccccaccacggctccaatactttgctcaactcatcggaacactattcgccacaattgtcgccccggtcatcttcaaactcttcactaccgcttacccatgtatcattgctgagggcgcaaatggtaacagtaccgatgccgccgccgctcaaggccgccgctgtgaattcagcggaccctccatcgcgacatggcgcgcggtggctgtcgcaacaacctctggagcctctgggcagtcggctattccagaagcgagcgggcgattcgctgtgttgttcgcagccgtcggcgtgatgattgtgttactgcggaatatgctaagagctttcccagctaaggtatatttgcctaatatgatgatgatggggttggcttttacgatgccttcgccgccgtatggaattgcgatgttgatgggggcactgggggcacgcatgtggaagtggagggaggagaggacgtttgagacgtattcgtcatcagtggcagcggggttagtggctggggaggggattgggggtatagtgaatggagttctgacgattgcggtgggctggggaggagatggctgaggtactggtttgggatgtcccagtggccggggttagcgaattagttatgcttacgcatatctagaactttcataaagtagttttgtcactggttttagtcaatgcgtttctgcacacggctttgatttcaaataaaatttactagatgataagttgacaacgcagagaagtagttacacaggtacccaaactaccaagaccatatagaccatctcaataaatactctcatgaggagcttctgtattgtagttataagccagggactaccgtggacggtttgttgaccgaaataaatgaaaccactactcctagacggctgtatgtattgacatttatatctcttgaggcccttaacgagattaaaccatccagccaagcagaccgcaactctagcaaaagcaagccatagaatattggaacactttggcagacacagaagtaagtactctctttcgcctgtaactattgtcaatctggatcattcttctagaatgtcaagccagccatgcttcctcatacccctgcgtacatttgactttccagggttgacttttgagtctggctgatttgtgtgttaggattctatatattctaaggtagtatgtgggattgaaaactgaccatttatttgtccgcggtgtaagcggtggcagcatcggcatcccagcggcgatagacgggctcggccacctcagagcgcttgtcggcggtgtatgcagtggcaacatcagcaccagagcgcttcttgtcggcagtatatgcagtcgccgcgtcggtatcccaacgtttatcagcggtgtatgcggtggcagcatccgcatcccagcgcttgtcggcagtgtaagcggtggcggcgtcggcgtcggtcctagacttcaagccaacgggggatgcattgacgagggttacggcaaggaccaacgcctgggtgagcgcaataagcgtcattctgaatgataagcctcaaaaatagaattagatgagtcgagtggagatatcttgacagatgatagatactgttatttgcccgatgaagctccctcttaggtgcgagcgaggagatacttatatacaaactagagcacaagtatggatgctgaataaaggctccacagactcattcgaatattcagttcatcttgtcacagccagtatcctattacgccatggcaggggattctgcacggtcatcagatgtcttggatgtacacgacattcttgttaccccctttggcacaggatcatcgactgaccatgcaggacgatggcttcagcgcatgaagagcccactccaacccctccttcccctcacctatgatgagaaatgacctttttcattattagccactttgagacataattgcacattgtgcacttctcgaagatcatctcgcctccatatacctgcaaccactctcaattccacattcggcccccctgaatacctagacaatatggacgcagaggacctgaagaaagaacatcgaaatagtatgtcgcccacgcagccaatcctcgacattagttacaatgaccgagagcctggccaccacgaagtggaatcccaacaacactcaccatatcgccccgcctcctgggcacggagagccctggtgatgcatggattgataatcctcttctatatcggccttgccgtttcgtcgtggacaaatattctattgggggaatgtcctggtcggagttcaatctaaattgtttagtgagtgcctaatccatggtgaagggttgtcagagaaccggaagtgtctaatagcaaccaattttagcacctgtccatgagcacatcaatatcgaagtcacagtcatttacgacaagcccagcgatatcaaggctagttcatatgtgggagagcctagtctagtggttgatgaggcctggtatcgactcttgcgtcgtaagtcatcctggtacactttatattgagattgtccaacgtattttcttctagatcacaacatacgcattattgaagatgagctgcaagcaatgaaccaaacctctattcccctccgtcatgggggtggatatcaaggaatgatggccgtcttccacgaactacattgcttggtatgttctttctttcccattgtacattcacaattgactgagcacgtcggatacagaaactcgttcgtgaagccgtccatgccgactactattacgcagaaaaatcccatgccgagagagccatgttgattggccatacaggtcagttttattctagcttcttccgttacctgcattcacctccctgaaaaataaccgttaaaactgggatcaaagcattgcatcgaaattcttcgctcggcatccatgtgccgcgctgataccgccatctttccataccactggaacgacgccacgcggcttcccaatcccacatgggtgcagaagcatgaatgtgtgaactgggcctctctggaggaatggttggagagtcgacggattgatatattcgcccctaacatgcgggtgcatccgaagtatggtgaattttgagtttgcgttattacaccaggcaattcgttggctaactgcataaaaccgtacataggccccgcatatccaggagggaagcggatttccgagccagttggaccgaaagtctatcctttagatgaatgatggagaatcggttaaatttctggtcaaacaaaatcagattcgttcatatagcctgtaagatgattgaaactaatgatattcagttcaagacttacgaaattccagctctaggtgtgaaaattgttaagcatgtgtaatgtttcttgcaagcctaaaccaaatgagccattgtggatgatcttgaagcctcgacctttcttttctcattagaaagtggtattgttagtaaggtagagatgatgttctggctgttcagtgaaagtacatcataccgtgtactgtaaactgaagccattcctaccccatagatcatcagtttcttcgaattctgcgcgttaagaaccgaatctgaccgcaaaacgggtgcatacggaaattagcatagtgggaatggcttcattcttttagcagagagatttgcacggaatagcttcattttttgaatttggataccatgcttactaaagccactgttatggtaattcaggctcgcacatcacgtcctgatcgtcttcggcagtagttttttcggtagcttaaagcacttccgaattcatggcagtaaacacccaccgggttttagagctttatatgtttgcgcagttattcaggccacaggtgtgcttcgattattgtttcaattacttcgcatccctggaatcagaaatatcaattagcaaataatagagtatatttccatacatgtacttgatgtaacccacattaatttgagttagtcaaattcccatcgaacgtgattacttcccaggatggtggcctgctagatgcccatgctgatcaaccgccccgatcttgtcgccctcaccatttggatacgcaactctctatataggaaatcatagagcctaagtacatataaaataatgagtatttactattattttagtatcactagaaagcccttttcttaagcattctagatcatatcttatctttcgtatccagctagtgtagcgtctgaaattcgtggttaaagttaaggtatatctttgaggtttagggctacgggaagaatgacactaacctaattcggccatattttgtacgcaccataactacctcttaactgtattttaaccctttgaaattttgagtacttatagtagggaccttaaatttgtgcatccaatttactannnnnnnnnnnnnnnnnnnnnnnnnnnnnnnnnnnnnnnnnnnnnnnnnnnnnnnnnnnnnnnnnnnnnnnnnnnnnnnnnnnnnnnnnnnnnnnnnnnnnnnnnnnnnnnnnnnnnnnnnnnnnnnnnnnnnnnnnnnnnnnnnnnnnnnnnnnnnnnnnnnnnnnnnnnnnnnnnnnnnnnnnnnnnnnnnnnnnnnnnnnnnnnnnnnnnnnnnnnnnnnnnnnnnnnnnnnnnnnnnnnnnnnnnnnnnnnnnnnnnnnnnnnnnnnnnnnnnnnnnnnnnnnnnnnnnnnnnnnnnnnnnnnnnnnnnnnnnnnnnnnnnnnnnnnnnnnnnnnnnnnnnnnnnnnnnnnnnnnnnnnnnnnnnnnnnnnnnnnnnnnnnnnnnnnnnnnnnnnnnnnnnnnnnnnnnnnnnnnnnnnnnnnnnnnnnnnnnnnnnnnnnnnnnnnnnnnnnnnnnnnnnnnnnnnnnnnnnnnnnnnnnnnnnnnnnnnnnnnnnnnnnnnnnnnnnnnnnnnnnnnnnnnnnnnnnnnnnnnnnnnnnnnnnnnnnnnnnnnnnnnnnnnnnnnnnnnnnnnnnnnnnnnnnnnnnnnnnnnnnnnnnnnnnnnnnnnnnnnnnnnnnnnnnnnnnnnnnnnnnnnnnnnnnnnnnnnnnnnnnnnnnnnnnnnnnnnnnnnnnnnnnnnnnnnnnnnnnnnnnnnnnnnnnnnnnnnnnnnnnnnnnnnnnnnnnnnnnnnnnnnnnnnnnnnnnnnnnnnnnnnnnnnnnnnnnnnnnnnnnnnnnnnnnnnnnnnnnnnnnnnnnnnnnnnnnnnnnnnnnnnnnnnnnnnnnnnnnnnnnnnnnnnnnnnnnnnnnnnnnnnnnnnnnnnnnnnnnnnnnnnnnnnnnnnnnnnnnnnnnnnnnnnnnnnnnnnnnnnnnnnnnnnnnnnnnnnnnnnnnnnnnnnnnnnnnnnnnnnnnnnnnnnnnnnnnnnnnnnnnnnnnnnnnnnnnnnnnnnnnnnnnnnnnnnnnnnnnnnnnnnnnnnnnnnnnnnnnnnnnnnnnnnnnnnnnnnnnnnnnnnnnnnnnnnnnnnnnnnnnnnnnnnnnnnnnnnnnnnnnnnnnnnnnnnnnnnnnnnnnnnnnnnnnnnnnnnnnnnnnnnnnnnnnnnnnnnnnnnnnnnnnnnnnnnnnnnnnnnnnnnnnnnnnnnnnnnnnnnnnnnnnnnnnnnnnnnnnnnnnnnnnnnnnnnnnnnnnnnnnnnnnnnnnnnnnnnnnnnnnnnnnnnnnnnnnnnnnnnnnnnnnnnnnnnnnnnnnnnnnnnnnnnnnnnnnnnnnnnnnnnnnnnnnnnnnnnnnnnnnnnnnnnnnnnnnnnnnnnnnnnnnnnnnnnnnnnnnnnnnnnnnnnnnnnnnnnnnnnnnnnnnnnnnnnnnnnnnnnnnnnnnnnnnnnnnnnnnnnnnnnnnnnnnnnnnnnnnnnnnnnnnnnnnnnnnnnnnnnnnnnnnnnnnnnnnnnnnnnnnnnnnnnnnnnnnnnnnnnnnnnnnnnnnnnnnnnnnnnnnnnnnnnnnnnnnnnnnnnnnnnnnnnnnnnnnnnnnnnnnnnnnnnnnnnnnnnnnnnnnnnnnnnnnnnnnnnnnnnnnnnnnnnnnnnnnnnnnnnnnnnnnnnnnnnnnnnnnnnnnnnnnnnnnnnnnnnnnnnnnnnnnnnnnnnnnnnnnnnnnnnnnnnnnnnnnnnnnnnnnnnnnnnnnnnnnnnnnnnnnnnnnnnnnnnnnnnnnnnnnnnnnnnnnnnnnnnnnnnnnnnnnnnnnnnnnnnnnnnnnnnnnnnnnnnnnnnnnnnnnnnnnnnnnnnnnnnnnnnnnnnnnnnnnnnnnnnnnnnnnnnnnnnnnnnnnnnnnnnnnnnnnnnnnnnnnnnnnnnnnnnnnnnnnnnnnnagtcaattgtctgagttaatactctgagttaatcctctgagttaattatctgagttaatactctgagttaatactccgagttaatattctgagttaattatctcagttaatcctctgagttgatcctctaaattaattctctaagttaaacctctgagttgatcttcctagtttatattccgatttaattctctgagttaatactctgagttaatactctgagttaatac
